United States Patent Application Publication US 2026/0191916 A1 - sequence listing, part 7

SEQ ID NO: 10 - DNA, 4346138 bp, Blautia caecimuris (residues 2,173,070-4,346,138 of 4,346,138)
  source 1..4346138: mol_type = genomic DNA
acgggcatttttaacagcctgctccttcatagctttacaaagaacatcaatatcttcatctgtaacatttaacccagtacataaagcctgatcgtagtaacgattacttccctcaaacagtaattcttttatcatatactcatcggcaagtcgggtagttccggcaacacggacatatacaccaccctctctgccaagagctttgatataatatggacgctgtctaccctcagaaacctctaccacaataacagttttaccatcaaccgtctgcaaagtgatatccgggataattgccggttcacagctgtctgatacagcattggcaatggcatccattttcttgaatacatcttccttgtcaaagccgacaacctctctggttttatcggcaattccgaaaatgatttttcctccggttccatttgcaaaggcaaccacagacttcatatatttgatacttttctctggcaggttctctttgaactctacattcttcgattctcctgcaagaatttcttctatggtcatcataacacctcgctctctttggcagcctttactgccatattttttacttaattgatgaagaaattgtgctcagtgctttgtttaaggcaacttcatcagcctgctttcttctctcactttcccacataccaagtatctgataaatacattctttcacaacagggaaatattttcgacactcctcttcgcttaactcatgaatccctttgctcagaattccgtaaatagttgtattttggatgagtatctccggcacatatccctgtaacatcttaattcgttcagccactcttgctttttcaaattcctcttcattaaccacatctcctgcagttgtttttgcctgataaataagtctttcaagaattcgcctcaagtaaacatatgaacctgcaccaacgccacttgcaaaaagtcctattgcagttccaagttctttacgatctttcttagaaattacatgcttgtaagcatctaattctgggaatgtcatatctgcaacagatggatactgtccaattttcatcattgcattgtctgtagtcagaacaatataatcaagatgatgtttctcatccattgaacaaatatattccaatttcattaatctcgtcgtatcagctatttgccaatttatccatttccattcttcagtagaactcttttcttgtctggctttggtgctaaatatcatattttgaagtgactctatttcttcgccaagagatgcacaactaatttcttcatctccctctggacccgtttcaaaataatactcaataggtttcatactaaaaacacgttcttgtttgcattctttacaataagcgctaattttaacattccctttaagtaactcaatcaagtcagcaatgttatcttcacaaatctctttagagtcatataatcccgcagtttgtaaaaatgcagcaaatatgttgtccatttacgcaagccctccttactttattttagccaaaacatcctggaaaattgcataatttttcttcacaccatcgtccaaatcaataggaatcatttggtcggcaaggtgatgaatcttttcctcgtaggttctgatttcagtatcctgtgcctgcaaggtggtcagcttcctgttcagcttcacacgctcaccggtggaaacattggcaattcgctgttccagatcagcaatagcagtgcgataacgagcttgctgttcatggacatagtcggtacggatacgggcaatggtgtctggctgatagcggtgcatataaatcaaagccttaaagccgttctttttgccactgtcaaacaaccagtaaattgggcgtttctgataaatcttgcaatggtcagaatagaaatcactcaagaaataattccgaattacatctttcggctgtcccttgccgcccagtgcatcagcaataaatttcaggttttcgtctaaggtatctacaccgtaaacggttttcacaaactctacgaacagaccgacaatatcatcctcaaagtattcatcgtcacaaatcggaataatgttatccttatctgcggcgaaagaagcatacttgctggcacaccccagggtgccctttcttcctccttcggaggaattcaccttgtcccattcgccgcctgcatagacaagaccgtccatatccagagaataacggccaaacatacagccaaccgcataggaaataaaagagcgaatatctctgccaaggtcagccttacggacagtgacatccttatcctcaacctccggtgtcagttcttcctgtaagccataaatgtcaatgaagatacgattcagttcttcctcgtttttctttaattctgtaaaacgaagataacactcattttcccaccgccgatatgcttcagacatctgattcatatcatgaatattatgtcttaaatcttcttccatttctttagaagtaaatggtttattacgaagaagaggatgttccttaaaatcccatgaaatttcaaaggaatcccaatctgcttttgaatactcaatacattcttttaccaatttagtcactgtatcttttttgctttcatctacaaccattggtattctaacaagatctccattagtaaaactcatcgtaggatcaagagcttgtaaatacgaaaaggtaacacacgaacataatgatcctatataataaggcaacaaatccaaatcatgtggaaaagctgatctacttgtatcatcaaacacaaaaccaggagctttatatttcacggcaaatctcgatgtacttaatttattccatgtcagtccttctttaaagtaccttactgtattctgaggacgtgcagcaagttttccagcagcatttctaaagcccttgatttctttcccattatactgccaatttacgaccattaaattatccgtataccattttctaaaatcaccgctactattacatggataccatttttcagttctatgttctgtttcatttacatctcgaacaccaaatccaatattttcaaaaaagacttcatgccaataacgttgaaaagtattattatcaccagttgcaaggcctgcacatggagcagcaacatcccccaacagtaccgcagtattgttatatggcaaaagtgctttttctggaagccaatacacaataggttcctctggaatccgtgtaaaagttaccttagatgtatgaaagcgatttattttgctcaaaaacatttcttctttagcatcctgtgaatttgcttttacaagtcgcacataagtgcccaaatacttgataatattagactttctcattacaaaacttgttgtctgaacaacttcaccgctaatttcttcaaatgcacgaggaccgaggtgtgccatatttataatatcagttgattgcaactttgctctcaactttataaatccagataaaaacatccatgcgtgttgggttatcattgcttgatacccaacttttttagtcattttactgcatgattcaataaaaacagcaaacaaatcacttttgctatctggataatccttctttacataatcatttaatttattagaacaatctgctaatgctcgatatggcggattcgtcacaaccacatcatacttctgagccagtgcttctgccacctgtaccaacggcagtaattctttcagtaccgtctcacgggacatatttatatcttccgtaatctctgcaaatcgttcatacagtgcggaccactcctgcggtgttaccgtcagaatcgaaccgtattcctttgcatcatgcagttctttgatgatagtgccaatagccgctgtgagcttcatatcgccattacagaaatagtccactgcaaatttgtctacatgattgctctccacaatggcgtatacatgaggctgaatgccacggctaaagaagcggcggtcatactgacgggctttcatcattaccgcaaaataagccagctgtgccgcacggtcatcaatgtccagaccgtaaagattgttctctacaatgcttgctactgcttcacgggtagtatagccataggattcatagatcttcatcagcacatcaaacatatatgcaagaatatgaccggaaccagagcatggatcaatgactttcagctgatctggtgtcagtgctgcgtattccttacgaatttctgcaagctgtgcctgcacttccggctcctgctcggcttcttccagatagtagtgccatttggtatcttctgggtcacggtttccggcagcataagcagactgttcttcctctgtcggtagaagctgctctttgacatccgggtgtccctccagccataaacgaccaaggctgttctctaccatatagcgaacaatccagtccggtgtgaaaagctgggttgctgcagggatgttttcttttgtgattttcacattctttttcagcgctgcgaatacatcgtcttttttctcactgttataatactgatacagccagccaatgatctggacagcatccttccagtcatcctccagtatcagttcgatcatctgctgaattacactaccttcacggagcagattatctggcagaagaagctcggtgtaatccgcaattttctggaacattcccggcagaatcttattcagagcgttacactgcacgatcaacagatatttatacagttcttcggtcttttcggcatctttcagctcatagaccttttccatatccaatccatccaaatccagatgaatagcttcggttatgatctgcggcttaaaattgttttcctcgtccgtgaacacacgcacatgggaaggaagatagccgttgacttccatgaatcgcagagcagaaaagcggttgaaccaagtataggcaacctcctccatgacctgcttatagcctttatcgttaatctcggcaatcagagcctgacgctgttttttttcatcggcagtaaggactttgccgccaacgctgtccgcattggcatcctcaatgttgtcctctgtgataccgtattccacaccttttagtgagacacgggcgatcagctctgttcttgcccagacagcaaattttttaatcgcattcttatccatactcatctctcctcgttaattcagcttgatctcgtcacaattcttcagtaactgtttcagctgagagcgaatcttctctacataatcatcaatgtccgcatccgtctgtaaggtctttgcctggaatacaacctgtcggttataggcacggacaacctttttctttgccggagctgcttcttttcctggctgcgtcggctgtactggcggcttcggtgcaggcggggccagaacagactcgatattgctgaccgtatcatccttgtactggcacatcggcaggaacatggcatccaaaagagcaaggctctttaattctgcgattttctccttgcactgactgaaatatttatctgatttctcaattagatgggatgctttggaatcaccgtttgcggcagtgtgggtagattccatacactgacgaaccgtttccagaacttcggcacgtttttcttccagcatcttgtcatgggcggtacgaaccgtatccatcaacggattcagttcacgaatccggttatagttgaacttgcttccggtctgaaccatggtaatcagacgaatggtattcagtgccttatgtgcttcctcattttccgcaattcggtcaaggtcatcatgcagagatttttcaaactgcactgcctggtcgaatactgttacctgggtcttgaagaagttttcaataccgttgctcatggcttccttgttatcatagagagcatcttcttttttcagcacacgctcaatcagggcaatattgtctttcttttgagaaagtacatcgtccatctgatgaatggcttcctgcaccaatgcacgatccgggtatttatgtccgtcataacgagcatccagagaagcatagtaatcacgctgttctgcaaatttctcggtcacaaagcgaatcagaccatcttcatcatccggcacatccatgatgtcgaaatactcacggagcattgcttttacatcacgcatcatcgtagcagaaatggttttacgcttgctaatggaagtcttaccaatctcactctttttgcggagcatatccggcagttttgggtcgtccggctgaatggtattgcctgcatacttgatggttactttctgggaataaatcagctgtgccgcaaccgcagcaatgtcgatttctttccatccatacggaatcgcactatatttgctttgcacatctgccatagaagtcggcaattttttcgcatcctgcatttccagatattcttccatagcagaagcagcatcacggtttggctccatgcctggaagtgccgttaccgcacctgtcagaattgcaataatatctgcatcactgcctgcattatctgtaatcagatcgagcttgctatatacatgagcaaccagatattccagagactggtcaatcttgcttttggcatttccagctttgatttccagatgctcaccgtctacatagaactgcgcctcttcaatagcattttgcaattcgctcatggcactcagctcatattttccggcttcatcctgctggtcactgatgattttctgcacggtttttggaagctggcttacatttctctgctttacgtacttacgaatcttcatagaagattccagagattcataataaggcgtatcagccagaactacgattgcttcgttacctttggattctgccatcagacggtaatctgttttttcaatggcatcagtagcaacagtcaggaagcgtagacgcatacctcctgttgccgcaccaacggtaattccatccaccatctgatcaaacgcaaagtcatattttccataacggaacttcttagttgtgaaaatatcaccgtaaatcatctgagcaatacgctccacgatagatgcggtatccacatttgtatctctgatttcacgctgaatatcctgttcttcgtcagtcaggaagttataagtgtctccggttctgccgatatagttctggctcatcaaacgatcaagacatccacggacagcttcacgcatgataatcttatccacccgaatgtcgtctgccataaggattacgatattgtccaaattggaaggaatatcatcaatatatcgaatcaagtacaaaagtttcagtacatctacatcctgctgttcaatgccgtccccgttgtcagcagctttctggcaacgctcgattactcggcggatcgaaccatccaggaaagtatgtacggtatcataaaaacggaagaacggaacaagtgcgtattcatccttctcctgaattttctgtgcagcttcctggaagccggacagcatagaacgctcaccgccggacagatgcttaccggaatttccatgtttacgaatttccgcaaataccttctgcatgatgataaactgatacggcacgaatgggaagttctctgtaaattccctcggaccggaataacctttaatatctagaatagagccgctaaaactgaacaggttacgcaaaacagaatcattctgctcataaacaccttccaggtcttttgttgcttccggcttctttttcaaaatacgcttctggataacttcgtccacagaggaagaagataaactcaatcttgttttaaaacgagcctggattcgggagaactcatcggcacgaactttgatgatttcatcaatggcttcctgtccagtgcagatcacccaaatctttccttcgcactcacttccgattttctctgtcaaagactgaaggttcaaaagcatatcggtatctgtaccaacatactgtccaacctcatcaatcataaacagtaaacggaagttcgcaggctttgtatctacataagctttcatatcttctacaagctgtgcaatagaaatttctgttgcggttttatcattgaaccatgcttttgcatcgtcctcactcatatccagaacttccatcaatgtcggaataataaactttccattgaaagcaaaggcacgacgcatttccagccaggacttgcctttcttttcttcaaaaactctgcggaactcctcggtttttctctgctggtcgatataacgctccatcatggcaacttttagattttcaccgtaaaatcccagatggttgtagaacatctttgcaaaaacacgaagtacagcggtcttgtctttattactgaagccctcaatatcaatattaaacagaattgtctctgttgttccctttgtggcacgatcaatcagcataaaggttgccggatcatcctcaaactttttacgaaaacgctctacactacggatgctttttacctctttattttccagaagataagaaagcattttcagaaagtgagatttaccacttccaaagaaaccagaaatccaaacacccatatcagctgtcggctgatcgaaagcatcaccgtaataattgaagaacgtaatgaaatgtttcttcaattctctggtaatgacatattcatttaactcctgctcgattacatcatcagcagcctgatctactttaattacaccattgattttgcggttaatgtcatccgcaaacatatctcgaatcatcatggctttatcccccttaatctatgacattgaatgcccggtaataatcatttggtgtcagacgattgaacagttttacatgacgaccatcaaactcacccggatacataaccaaaatcggaacatccgaaaaatacggctgcaaggcttccagtaaagtatggattctcataaacgggaacacctcgcctacacccgtcagcatcagcacatcgcccggttcgtgcggctcatactggattttatctatgaactctccattgccgattgcggaattaagctgttccagaagataagcgcttccgtcagcttcttccatatcgggaatcgcatctgtgatgtccatatcatcacagatagagagaaatgttttatataaattacaaacgatcaaatggcaatctaaggactgatcggtttccagctgattcacaaaatggcggacaaccatttcattctccggttcataacagaagattctgatattcacttcattgctaagtcctttgccttccagaaactctgattcctggatcaatgcccgaactttgtccaggcgctcttctatttcgctcatcgggttacctcctacacaaagcaattaaacgccgacagtacagccgtgtcgccattgcttctgatggcattttccaaaactggatacagccatactggattcaaatgatctgccctgatgttgtcgagatattctgtttcgacaagcactctggctatgatctgttttaactttgttatcgtactatcactccaggaagctacggtatcattttgttcctgcaagcgcataaaaaatgtattcaaatctatcttaccaaaagacgtgtcccttaatctgtacttctcaccaatgactgtcagcataaattccaaaaccagtcgactctgcttcatcaatgcatacaaacaaatctgttttgctacatccgttggctgtgacgcaatcgcagcaaccagtgaatcatcttctagaacatgaagtcgtttgatgcaggctttcgccatacgtgtaatagatttttcagttggatactgaaaaagattctgctctacaatttcttttacaatcgcatcatcggaaatgccttctgacataagctttgcagtggaacgcatttcgtaaaaaaggaacggttctctggtcaaagatgcattatagggataagaatgattcatgttcccgtacctccttactgctcctcttttttatctggaataaattccatgatgtctcccacatcacaatttaaagcagaacatatctttgacagaatctctgtacttacattttcatcttttgataatcgagacatcgttgttgtactaactcctgtcattgcacgcaaatctttcttcatcatttctttatcaatcaacaatttccacaatttcttgtaactaactgccattttttcacctcaatcttatttgcttgaaatatctgttcacatggtatttattatcatatcacaaaaatgcgtttcaaacaatccaatctatcaaaaatcgtaatttaattctgaaatatcgcatttaaaatcataaaaagcacatcttaataaagcaagcagaaaatacaagtgccactatatatccgattccacagaaaaattttatctcgtttattttctctgattgcaattccactctttttttcagtttttgtatctccttcgtagcaatccttctattctggtctgcctgatatttcattgactgcaattgtttttctgcccctctttgtttctcctgcgcctgtctgactgcttccaccgaagacatctccaccagtttttccaacttacagttctggtcccgaatgtcttttatttcttcttcgagctgctcctgctctctcctgctcttcaaaccgtttctgttcctcaaatcgtcgttgctctgctgtaaagactgattgagtttccgcatttcggacagttctactgtcatctgctgaatttcggcgttcgatttctgcatttcttcttgcagcctgtgattctcgaagaatagcttctgtttttctattttcaatgcgtgtgtcctttcctgaaattctaggataaactcgctcattttctgatttctcacctgtaactcgtccctctctttcgtcaccagctccagtgatgccgcctgctccttcgcaagctgcttccacttgtcggtagtatccggcaagttcttcatctgctccgtttgtttgttctgtttcggctcgtaccctttcgtaatttccattaaattcattttctaaatcctccttactgatatccagatggaatgttttagacagattgctgtctcgcaccttcttaccatcctggttctgaaatgtgatgtgcttccgtttctctgtccagtttacgttccatccaaactgtttcattttttctataaacttttctttactgatacaattttccagtgcctttaataccgccattgcacagtcagccacaaagctgtctttcacctgctggcggaacagattatatttgtccttactccatgcaatgacttcccctttttcaatctgacttccatcaaaatgttttcctttttcggcaacggacaatccacgttcccggcacatctgattcgttagtttcttcatgctctccaaatcttgtctggtattatgcagctttcttccatcctcatagctcacagaatttgtaaccagatgacaatgaatatggtccttgtccttatgcaccgtcactaaagtctggaatccctgaaaccatttttctgcaaactcgtttccaaattcaaatgcctgctctggggtaatctgctcgtccttatgccaggaaataatgttgtgagcgtacattctcccagaatctttatcccacatcttcttttcctccaaaaatgttctgtacaccagatcataattgatctcatcatggcaatacggacctgttacataagtcagcagttcacttgttttgtcctgacgcaaaacgtattcgatgcagtttctcattgctccatgtgaatttgtccgcttattaatcgtcttattaacagccatatcttttcactctcctttcgatacttgaggatatttttattgagataatacaaagcattgtctgacggaacggaaccatccgtatgcaacttccttgtaatctgattgatatttgtagcagatccccgaagctgatcaagaagatccgcaaacatctgattcaatcttttcagttcttccacttcttctgccgatactatctttaaatcagcaattgcctttatcacaacttcctgctgtgttctccctgattccttcactttgctttgaagcagctcatattctgctttgttcattcgtatggttactgtataatttcgttttctcataaactttcggctccttcctttcttgattttcattctttattaatagacagcgttctggtgacatattggcaggagatttataagagagtgcaacgctctcttatacaggttcagggtgcatgacgtccagtggacgtcagctttgcaccgaccggagcggcagcggagacaaaccctagtcaattagtaagtgttccgcaggaatgtccggtggacatttcgcaggattacttacgtcattgacgtgccggggttccaaggggcagacgccccatggcaagtttaggaacagcccaaaggctggctccggtgcagagtggcttgccactttgcgaaacttgcctgtcatctccccaccactgaactagcaccagtcaagtaacctttctcctctgcgttatccaccctaaatagagatgatggtggttttgtggtgcagggccagactgtggaagaaatagaaaagctcccattttgatagattttctctttctgaaacaggctgttcatgcatcactccgatgcgaagtatcggacaatcatgtgccgtatccggcactctattcttttctttgcttgcttgttcaatccacccatctgccaacgcttttctgttatattttcctgttatttctgtctttctttttctgaatcactttccagttctgctgaaaaacataaaaatagcagtcataaacattccactgatccttaccaatagaaatgccatcactgccattgtttttttctgctattctgtttttgtaaatctattccttactgtcagtttgttttcctgttactgctatttcataaccatctaaaaactgtccgcaaaatccagtgctgcatccatatcagcttctttctcccaatccagattatcttctgcgatctctccatccattttctccattgttagcgttctgtccgacatattactttctcctaccgattcttttacaaacggtacaagcatttctatcagattcttcgctatagccatcgggacggattcctttactccatcccgtacagctgtttccactctttccaaaaacgcatcttccttttctctggtttccagatacggatctgcttcattcctgtactctctggaaaaataatcattcaaagctactacaactgctctggtgtacgatttatatttatccctgtccatcgtctgcaaatattcccatgcctgtctgtcctgttcatcacaaagatttaaacggatatttgtattgatgattttccgttcttgtctcatacaagcatccctccgtttctctggattttccttacagtcattgcttcataacctttcgctgtggcacagatgtcccgcacaatcgtcaccctgctcttgtcgtattctccaaaattctggatcatacaaccgccaccgccgaccacatgacgcatcagttccggattatattcccgttctcgcagcttatggaagatttctttcgtataatctccggcagctttgcgaatgactgccagatatttttcaccaatatctgctgttccggtacggatcacctgctcaataaccagatcgtccaccactgttcccagttctctcagcagggattccctgacagcaagcacacactggtgcgttccatatttctctgtaaagcatttcttctctaatggacgggaattattgatatacataatgttcatagttccgtttccaatatctgccagcatattgatgcccttgaaatcctgcaagcgataaaaagctgccacaaatccctgtgggtaaatatccgctccctcaaactcaatatgatactgtttattgcggaatctaaaatccacgctttcattctggagaagatatttctggaaatcttctttctgtgtagctacccaggtaagcggaagtccggctgcaatgtgtacctttgcccgattcattcctttcccatccagttcccttgcaatagccgccagtgtcagtacataatagtcctcgtcctgtgttttctctgcacagaactccttgtgttcctctccaatttggtaatacataccattgtaaacaagaagattattatggaagattggctccttgtcatatctggctacaccggatggaaaacatctggtagctgttttcatgtttccataaccatgatcaatcccgatcaccataattgtttcatttctgttatttttcatcattctcataatcatacctcattctttcttttcttatccaatcctattaatacttacgtgaattgataagatggatattttatttactggttctttaataattcatatttgataacatggattattaatagcaacggtttatccaatatgggatttaccatatctgattttcctattttctgatgtccggagatagaaatttcctatgacctgattgtccaaaattggactatccacacttaatcattttcttctcctaatggaacttcccggataatatattcggtatcgccataaaagccatattcattacgcaatctatgacgttccacatatccatgatgctctaattccttaattgcagaacgaagaaaatcaatcccatctctgctcaatgttgccagtccttgcatattataattccagtcctctggcaaacttaacatcagtgacaatagacctttcgctttcaatgtcagattcttattcttgaaatggtgattactcattaccgtaaaattcttagttttctctacacgaaaaatctgtgccatgctcccatcctcctttccagacagaaaaagacgcaagccatatttttatgactcacgcctttctctactcatattttcaaaatctttatttaattttggactcgatgaatccaaacttgttttttctttttcagattgtttttttccatcatttaaacataaatcaattccttgagaataatctcttccgcaatcgctctgtgctgattagcagctcttacccaggcaatctgatctttctctttatccggtaatggttctttttcttccaactgtttcaggatcacttcttcccgttctctggctgccttatctacttccagaaggtgttctccaattgtatcctgtaaaagcatcacctgataggttgaatttcgatgttttttcagataatctctgcgaagaaaaccatacttgccaagttgctccatctgctcaccggatttataggtgagattcggaatcaggtatccatttacattcgtgtacgttaatttcattttattagcactctccatttctcatcattttttgaccacaaatttacgacatttacgacaaatctgacactgctttacaataccagacaaaatgacggatgccctggaaagcctgtaaaacaggcacttccgggatacacaagacaggataaaaatcgacttccattatcaagaggcgagtgctaatttttttgttatttttttgcaaaccctttaaaatcaatggtttgcagtcccgtgtttcttttaaaactgtgattttttctgttttgacaccaatttgacaccaatttttctttttatggtgtcaagcatttaacaccatattatccaatcttgcaatctcattttcaatccttgtcagctctccgatatgattatacacttccattgttacattggataagatttccgaaagtggcaaaagtaggtgctttcatttcgtcgagaagatacatgtaacgaatgtcattgcgacatagtttttcgatttcacgcagcgaacaatatcttgataggtcgatgtgatccataacctcacaaaaagtgtataccggatcagaaatatcaattaatttttcgatttctaatggtaatttcagctgacgagctgtataattatcattggtattttgatttagtagcataattcattataccaaaaaatcgctcagactccacggtctgggcgatttttctattagggaagtttttttacacccccttttttcatggaaatgtatagggcgacagccctacagcgagggaattctttcccgagctgtgcatggcgtaacattctctttcgcactcgattttcttgatttgaccacatttttacgacaaatctttggaaaaatatattcgtctgattttcttaccacattttacgacaacggcttctgttttataccacagcaggtacggtttctggcaggttcattttagacatctcgttctccacatgagacttccggtaatttcatccttcccatcggcttaccgccaccctgttctggtacagaaacataatgttctgacatagaaaacgcattatttcctgtcaacgcaatcacctttgcattttccaaaatcacttcatccagtttgccttcgacatctttccgggtaaccagaacgaacagacgactttgaaaccattggaatctaaaatccttcaggattttaattgcagtaaattcatttactgttcggattcgggacttggaagtacatccaaccgaatcgtatcttttttaatataatcgtattgtatttgaaattccaaactgctcggccatctgtgaaaatgtgaagctagtcaacgaatgaagtagaaaacgttatccaaaaactgtaaaataaaaatcgaggtcattctcccgggataaggaagtattgacctcaacattttctaaaatatttcgttgttaaacttctattcttctatttgcatcatattcagagattttccaaaacgtcttggacgtgtaaaaagatttacttctccccattgtgcaagcaactgctcaatcaatcttgtcttatctacataataaaaatcttcctgtcgaatcttttcaaaatcttcgattccgattggaagtttctttaactcggccatttgtatccccctttcaacctaaaaaacaggattcatgctatcgttgtttttaatgatagcatgaatcctgttttctgccaagtaaggatgctggagaattgtgacatgtgacacttagcagttgctgttcacactatgtgtgtccagttatacatctcggcattttaaagcgtagttcttatccactcatccgccagctccggccactgttttacttcttcattcgcctgttctttctcacgcgtagtctgtccgttgaacattttcgccatttcattcaaagcctgtttcgcttcttccggcacaggaaataaggtgatttaatttttcctacaattcatatacccctgcttccaccctcattttttctcttccatctatcagaatctctgcacacatgtttgttggaatctcaacgtgatatttcacttttccttcttcatacttccactccgaaacaatctttccatacggagaatcataggctgcagctgcaaacctaagccgctcatccggatatggctggatcacgatttttccatctgaaacattgattccgcagacacagtccatcaaccagcctgcaacagccccataagaatagtgattgaaagaatcatgtggatttccttcctcgtcatagcagtcccagctttccggaatcgtggtacaaccttttgtaaccgcaaacagccagccgggtttttcttcttgcagaagaaggtcgtatgctttcctgttctgcccatattggctcaagcttctgcttaattcatgtgtcgtaagaaaaccggtatttagatgattttcatttctttcgatcattttcgccagttcagaagcggcttttgttttctccttttctgacagtaaatcatgtgcaatcggacggacatatcggcactgtcttgttttttctttcacagagccgttttccagatatactgtgcggtaagctgctttgaccttttctgccaatttcttataatactactgatcctcatcttctccaagtatctccgccatctgagccatgtagttcagattcatataataaaatgcagttcctacctccgggtcacctttcatgacaatatcgctcatataattgacatcctgtcccggttcgagccattctccccacatccattccgtatcaatcatatatttcctatattttcttggaagaagtctgcaattgcagaatcttgttttctgtgccctcttaatctcatatgcagtccatcgtttcatcgcctcataattttctctgacgagggcatcatctccatatcgtttcatcaggcgatatggtacaatttcaaaagaatctgaccatccgattcctccatctgttgtcaatacccctccgattttttcttttttcccaggtgtattcgctttcggtgcaatctgtggcaccacgccatctttatattgacctgctgcctgttcgcgaatccattttgcatagaccggatagcagtccatcagatacattgcagtatggatataagcctgacaatctccggaataacctgatttttcacgtgtcggacagtccgtcggtacatcaataaagttccctttcatagaccagagtgcattttgaaataactgattcacttctgatatgccacaggaaaattctgctgttgtcctgatatcagaatatacagccaccgctcgaaatgctgccggatcaatttcaaaatccgcttccactttcacataacggaatcccatataagtttttgtcggatgatatttatttcttccttctctgcaaatgtaatcaatctgctgttttgtcggaactgccttattctggaaattttcaatcgtaaagttgccttttccatccaaaacttctccatgaatcaaggtcaacttctttccttcctgttcatcaaattcaaaggaaacatatcccacgatgttctgtgcaaaatcaagaaccacctctcctgccggagtgatgatctgctttgcgaataaggtttcatgcggggtaaccggaactgtatcaaccggaatcaactgcttcattccataattttgaactttcaccagatgaaaccgctccccacagtcttccatcagaccatgttccatcgggaattctttcctggcatcatatacttcccctgccataaagtcattttctccaatcggaccatcctgggttgcagtccatgtttcgtccgaaacaacaattggctctcttgcaatctcaaattgaagcaataatgccagatccgttccataaatatttttattctgggagaatcccattgcaccacgataccagccatcccccaaagataccataatttcattctcaccttctcgtaaaaaccgagtcacttccaatgtctcaatcatcagacgcttatcatactgctgtgttccaggcatgaactgatgatttgttatctcttctccattgataaaaagattcataattccatgacaggttgcataaatatatgccccttgctgctctgctgtttccatctgtttcctggtaagagaaaatctttttctaagatagcttgctcttcgattttcctttttcttatcctcaagttccggatcaatccatttcgcattccattcttctttattaataccagtcacaacagtaatacctgccggttctgactctttcttctcttcatcccagactttcacacagattttcacttttgttcttgatgggatttcttttttcagaatgcataccatagcattgctttcttcttccacgatttccaacacatttccttctgtgtcctgaactgtcacttcaaatccgttttgcttttttccaccttccagattccagctcaaacgcagatttttcccactgattccaactggctttgttaggtgatttacctgtagatttctgattttcattctattttccgtctcttttcctttcattttcattcaagaatgcctctgcaatcctgccggaggctatatcagttcttctccttcttgtttaacgcattcaaaactgcttcatacatcggtttcgcctccggtgcagctccaagaagctcagccagtgtcattccatatgcgaactggatcatcggaccttccagcattcccggtgccatctgattaaacatttctacagcaagtggttccgcaacgatttcgccaagtgtgctatccatactgaatctctctactgcaagacttgtctctgtatcatattcaaaatcatatacgccggaaccaacttcgtgtacttcctctttttccggaaggacgatcacagctgttgtgttggccggaacttctacatgcacatggatctttccagccttacaggatgtattagccacgatttttccgtaaacagaatcaaactctgtgccccactcttcaatgccttttacaaacattggttttacctggaatttcttatatcctggctctaactgagataatccggcaactttacgatacatccagtctcctacagaaccatacgcataatggttcagagaattcattcctgattcatcaaatgttccgtctggtttgattgaattccaacgctcccagattgttgttgctcccatgtttactgcatagagccatgacggataatcttctttcatgaagagagttgcagccatttcatgagctccattttcagaaagtgtatggcagatatatggtgttccaacgaatcctgtagctaaatgatttttgtgatttgcaatatttgtaagcagagtattcaagatacgttttctgtctttttctcttgcaagattaaagtatagggaaatgatagcacctgtctgtgtttcacttacaatacgtcctgtctctgtataatattctcgtcgaaatgcatccaaagttgtttcgtaaagctccgcatactttttcgcttcttcgtcttttcccagcacctctgccgttttcttgacaagctctgttacatacagatagtacgcatttgcaatcatatatttatctgtcgcaccggttctgtctgcgctctcttctttatccagtgcaagccagtctccatactggaatccactctgccagagaccgttctctccacagttattcttgatataatctacccattcatgcatacatttccagttttcttccagaatacctttgtctccgtaaatctgataaaccacccacggaacgataactgctacatcactccatgcagaagaactgtaggaatccagaatatctggcactacatgcggaacacccttttcaagagaagattctgctgccacatcacgcatccattttttgtaaaataatgctgtatttctgttaaatgccgctgtccaggagaacacctgcgcatctccggtccatccaagacgctcgtctctctgcggacaatctgtcgggatatcaaggaaattatctctctggctccatgtaatattactttgtagctgatttacttttttgttagaacaatggaaatcacctgtcttttccatatcagaatgtgtcacacaggcaataaactgatctgctgtaaattcttccattccttccacacagatataacggaatccgtggaatgtaaaatgcggtcgaaaaatctgttcttctccgttgcagataaatgtatcgattgattttgcctgacgaagtgtctccggatagaagttgccatccttgtccagtacctctgcgtgacggagcacgatcttctgtcccttttcacctttcacatgcacttctacaacacctgtaacaatctgtccgaagtcaacaagtttttcaccctttggtgtcacaatcaactctttacccacaattttctctgtgatacgaacaggttcattctcctgtgcggtcagaacagccttatcaaactctttgacaacgacttttccctcttttatctccggtgcatctgtgtcaattgtctcacccatgtaaatttcactgtaacgaatctctcctgtttttacagcccatgtttcatctgtagcgattacctctttgcttccatcttcatactcaacatgaagctctgcaaatgctcctgcttgtgtaccatactgattcggctggcaatagaaaccaaggattcctttataccatccgtttccaactgtaattgcgatttcattttcttctgcaagctgctctgtcacatcatagatctgatactgcagtctgttgtgatagcttgtccatcccggtgccatacggtaatcacctactgtctgtccattcagtgtgacctcatatacaccatgtgcagttgcatacagacgggctttctttacctttttatcaattgcaaatgtttttccaaatataggacatgctgtctcatcttccgagaaatcacttgtgatcatctgtgctttgaattctgtctgattaaaaattcctgtctcaaaagaaccttccactgactctacatttccatgattatcagctacagttacttctactgaataaaaagtctcacctgccagtgcttcaccttcatatgaaatcaagacagactggtcagatatctttttcccactatcccatacaagttttccattttcatctgtcactttaatctcataggatgtctgtactgtatctttctcatcagattctattttccaggaaaatcttggtgctttctctgtaagtccgattggattttctctgtattctgttctaaaatcatataatctcattctatttcctccattttcagtaaatccacaaaaggacagaacctcattggcagttccgtcccttcattttattctatcatttctattctgtttcttttctcttctgcaattctgctacaatctcaggatatctcttctcaagatcatacttctttaagaggataaacatgattacgaaaagtgcaagcggaatgtagataccaaatacaaagattgctgtatctaccgatgccggctgaacctcaagtgctgctttataacctgctgctgcgagaagccatccgatcagggatgctccgataccggatccgatcttacctccgaatgagtttgcactgtttgtcatacctacaatacgttttccaaacttgtaatcattatactcaacacagttattaaccattgctccaaacaggcacatcagaggtatattggcaaatgttgtaacaacaccacctgcaatacatgttgcaaggctatatggagtaaatactctgactaaacaagctacagctcccataacacaggaaaccatacaagtttttgtcatacctaatttggatgtcatcggtcctgtcaggataaatccaaggaatgtagggatcagtccgactgctccaagaagtgctatgatgttatcatttccgagaatatattttgcataatatgtaccaccggatgtgctaagtccgtaagaaatattcattaaaaactgaagtatgagcatgatcacccagtatttgttcttgaaaagaatcttaaggccttctgcaaattgcacatcctcatcttcacttttttctacaatctgcacattttcctttgaaaccttgtaaagtaacaataaagaaagtactgaaatcaatccaaagattacagcaactttaatccatgcactctgtgttccgccaagcatatttgtgatcggaatcaaaaggatcgcaatgatcattcctgcaagatatccgaatgctgcacggaagatacccatcttaccacgctcttcagagctctctgtacgcatagccatcaatgctccgtaaggaattgcaactgctgtgtaaacaactgctgtgatcaatatatttgtgattaatacgtatgctgcctgtactccgctgcctgcattctttggcactgtaaacagtaacacgatcattacaaataccggaatcgccattctaatgaaccaaggacgacattttccttttggtgattttccggcgtccacgatcttacccataagaagatctgaaaatgcatcgataatctttgcaaccagaagcattgtcgcaaccattcctgctgccaatccaaccttctctgtatagaagtaagtcagctgtcccaccagaccagacataatgttcagtggcatctgtccaagaccatcaccgagataatctgtcattctcattgatttctgaactcccattgagtccagaccaagttctttttttgttttagccattttttgtccctctcttattttttccttatcccgttattctcagcttactgtgaataacaactctttattacaatctcatcctataattgatttaacgcatttaccatctgctcaagcatctctctcttaattcccggaacgaagcttagaagctgacgaagcggcattccttccatcatggctgccatcatttcctgattcacaacccctgactggtcgtttgcattcgcttctgccatatccgttgctgcatcattttgtgccatttcctgcataaatggtgccatcacagcttgtgctttcggatcacgcatcagctcaccaagacaagtatttaaggaatatacctttggaatttcctttgtcggatgtaccaaaatttctccgcttaagcacatttgatctgcattttctccaatcattacctgataactaccttcttctgcataccaatcatggatctgtgtgttccagtaagaaaaagctctctcatctaaagtaaatgtaactgtcttctcttctcctgcctctaaggataccttttcgaatcctctcagctctctgaccggacgtacaacttctgcctccggagctgcaacatacagctgaacaactgtcttaccggcacgttttcctgtatttttaacctttacacttacttctacatgttctttgtcggacatttctttcttatccaactgaagatcactgtatgcaaatgttgtataagataatccgtagccaaacgggaatgctgtttccatctttctggatgtgtaatagcgatatccgacaaacacaccttcctgataaactgcattgtcaaatccttttccataagtcagataacatggtgtatcttccagacgaagtggaaatgtctctgcaagacgtccgctaggattctttcttcctgcaagtacttccgcaaccgcttttccgactgcctctcctccaagataagcttccagaattccttccacctgatctttccaaggcataacaaccgcggaaccattgtgaagaacaacgactacatgcttctgtacttcgagtactttctgtacaagttcattctgacaatccggaaggttcatgtgctttctatcatatccttcggattcaaagttatccggaagtccgagaaaaagaactgttacgtcagcttttgctgccgcttttactgcttcgttctgaagttcttcgataacctcatctttctcgtcctgataaccttctgcaaaagtcacattcgcaagttccggaatctctttggccgcttccagtgcggattccactttccagctgttaatatgggagcttccaccaccctgatatcttggtgtctttgcgtactttccgataaatgcgatcttctgatcagaagttaacggaaggatttcattttcattctttaataataccatacattccgcttcgatttcagctgctgcttcatgatctttttcataatcaaatacagcttctgtgtcgcggttctctgtgtagcggaaaatcacatcaagtactctctcgcaagcctggtcaacaacgctttcgtcaagttttccttcccgaactgctttcacgatcagtcggtcattctcaaaatctccaggcggcatctccaggtcaagtcctgctgcaagagaagatactctgtcatttactgcaccccagtcagaaacaacatatccgtcaaatccccattcttctcttaagatctctgtcagatactccttgctgtctcctacaaattctccattaacgcgattgtaggaactcataactgtccaaggttttgctttctttactgcaccctcaaaggatgcaagatagatttctcttaatgttctttcatccatatcagaggagtttgtcatacggcgtttctcctgattgtttgcaacaaaatgctttgcacttgttccaacattcttgctctgaattccttcaatcagtgctgctgccatctctgtagatacgaatggatcctctgaataatattcaaagtttcttccgcaaagtggggaacgtttaatgttcattgccggtccgaggatcgtgcttacatccattgcctgacactcctgtccaagcagttctccctgcctgcggatcagatcacggtcaaaacttgatgcagtcgcacatcctgccgggaagcagattgccttctcactctcgttaattccaagatggtctgctccctgtgcctgttttctaagtccatgcggtccgtctgtcaccataacggatggaatccccagacgctcaattcctttcagatgccagaagtctgctccggagcacatcccagctttttcttccagtgtcatctgtgagatcagattctgaatcttctctttttccatgctgttacctccattttttatgatttcttactttctgctttgttctatcggttcttcatcatggctttataataactagaaaacagttgtttttatttcactattaaacttttatttatatatttacacttttattttctgtttttctattgactcggaaaatattttcgattacgctgatagatagaatgtaacatacaaattattattacacatagaacagaggcagaaacttatggaaagaacttgttccctgattcattttattgaaacttactacctggactcaaatattccgctgtatcttttttcggatgaaaaatgtattttctgcatgccggaacagaatgaactgacttatccaccattccaatatcttcaggaacttttttccggttcagaccgtattacttactgcacgaccgaatatggtattattttttgctctcttagattaaatcactggaaaaacggttacattgtttttggtccagtcacaactgtgccttattctgattctgatctgcagcatttatacaaagactacatggtatcaaacgacagccgctctgacttcaatttgtttctccgccagattccatgtctatccttgccttctctgttgaaaaaatgtatctttttaaattattgtctgcatgaagaaaccatttcactcgaccagcttacttctgttgggcagacattttctgaaaatgatgttacaaccgatgcctctcttcttctggaagaaacttatcagaaaaaggaaaatgagcaacacaaccagacatatattcttgaagaacagcttttgaaacttgtccgcacgggtaactgcgacggatttaaggaatttatgtatagcgaaagtaactttcatatcggtgtcactggctctactgctctgcgccagttaaaaaataatattatcatcacaacgaccttatgtacccgtgctgcaattgaaggcggactggattatgacactgcttatcagctctccgattatttcatccagtcttctgaacgactgacaagtgctgctcgtttaaccgaccttcttagtaaagtcagttatacttttgcagagaaagttgctcaatcaaaaacgcccgtctctacagacgagcgcatgcaaaaagcaattcgttatattcagcagaatgtgaatcagcatctcaccgttggagatgttgctgattatgttggattcagtaaatcctacttttctgcttattttaaggaaacgcttggtttttccgtcagtgcatttatccttcgctgtaaactggaagaaggaagagaacttctgcaatatacggataagtccatcagtacaatcagtgaattcctctgcttctcaagtcagagccattttcataccgcattcaaaaaacaattcggaatgacaccttctgagtataggaagagggcctgcaacgcttaacctcaattcttcctctgcatccggaagcaattgctgtacacttcattgtatgaatctctggtgttttgacatccaataccagaaagtctttatccatgccatctggtctttctcctcatccgacaatggatctttttcttccaactgtttcaggatcacttcttcccgttctctggctgccttgtccatttccagaagatgctctccaatggtgtcccgcagaagcatcacctgatacattgagtttcgatgattcttcagataatctctgcgtaagaatccatcttttccaggttgctccatctgctcaccggacttataagtgagattcggaatcaggtatccatttacattcgtatacgttatataaataggacattcgcaatccgctttcgctacttgctcatgaacgcagttgctttcactgcctgcgttcattttattagcactctccatttctcatcattttttgaccacaaatttacgacatttacgacaaatctgacactgctttacaataccagacaaaatggctgatgccccggaaagcctgtaaaacaggcacttccgggatacacaagacaggacaaaaatcgacttccattatcaataggtgagtgctaattattttttcttatactttaacggagaaactccatatgcttttttgaagcttctgataaaatagcttacattctgatatccgctctgcattgcaatctctgtaacaggagtatccgtatcttgtaacagctgttttgcatactctaatcgtaaatgtgtaatatattgcgaaagtgtaatatgaaaatgttccttaaaatatcgcgatatatatttttccgaaagatgaaactgctcaccaaattctttcaacgatatcttttctttaaaattctgctgtacatatgaaatgatttctttttctacagtatttctcccgcttttatcattttcgattacaaagcccttctcccacatttcaagaataaattgtaaaagaattctttttgtctttatctgagcagttatttcagactcaattttcttattttttgccatatatgtctcaaccaactgctcacacagttcttttgctgtatcttttattcttgggtctatcatcagatgaccattttttaacggcttcagtaatttatcatctaacatatcatttacgcaaaaagatatgtattctaatggaaaaaggaaagtaaaataatctactgtaccagtctgtgaacccatgaaatgcagattacccggcgaaactacaaaagcatccccgggggttccaatataattttctcctgatatacttacagtcaaaaaaccactttttacatatataatttccagttcatcatgccaatgtaccggtatctgaaatgatcgtcctccattttttatatgatatgtactaaacggatcatcctttgtaccgtgtggtttattttcttttaattcaaagtacataatctctcctttaacattccctacagccaaaacagaggatttacgacacatcagataattctacaagacttttactcttccattttccactcttccatctaagtaccattcccacagctctcgcacattcgtcgcctgccatagcaatatatgctcccacagccagaagtcccatgtgtattccgagaaaatatgttccgccaactgcaaataaatacataaatatcgcacctagcacaaccgggaaaactgcatctccactcgtttttaatgcctgaccatatacaaggtttgttacccttccaaattcaagaaatatatctactattaacaactttaccacaagatttatcatctgtatatcatcggtaaatatatgcactataaaatgcccgaccaatgcaaatgttacagaaaagcatgtcgctgtgatgattccgtatatcgcagcttttctcgttcccctgttgcatttctcaaactcttttgctccaattctccagccggtcataattgcatttgcctgagcaagggcagctcccacacaatacgagaaatttgcaatctgcacagcatatgagcgagctgtaacattcattccatccacatccatctgattcataaaacgcacaatcaaggtcattgcgatgttgtaaagtgcagtttcaagtgcagaaggaaaaccaatcttaacaatctgcgcaaatatctttcttgatgtaatccgttcaggactctgctttgcttttataagcacagcccccatgccagctacaataataagatttacaactctcgaaataactgtggcaacagcaactcccattacgccccaattgaatacaaataagaatactgaattaagtattatattaaaaacatttccaacaacagttcctattaaagaatgctttgtatatccaaatactctcaaataactggagaaaataggaataagtgcatttaaaaaacatgtgccaccaacaattctaaggtatatttcagctggctcaagcaaagccggagcaatacttacgattctaagcatcccaccagaaaaggcagcaagaatgatagacattatgatacctatcaatgcgttgaatataagtccaagttgtcttgcctgatatgcaatccccggtcttccggctccaatattttgtgacataacagctatcatacccgatgatattactccaaacataataataaaaacgcctatatatgtgttggctgttcccactgctcctacagcctggtcacttacagatgatagcataagcgtatcgaccataccggaaagcatataaaataaagtttctaagcatattggcacagatagctgtgttaatgtttttcttttagctgtcatgtttttctcctcacatacaattcaagactactctatcaataatacgacatatttctatgtgattcttgtataatatcatgcgaaaattgcactatttctactttatcttgaaaagtaccaggaatttgttaacgctacgagccatgcacatctacgtgaaaaggggctgtaaaaagcctctgattaagaaacgccagaaccggcatttgccggaactggcgtttctttgtatgaatcttcccatttctgctcatacatgcaccttttcgtagaaaaaatggtatacttaataagcctcagccaatcacgcttaaattttaagcaaccttcatttgccgctgctttttgttgtgatatttataaagattgaatccgcatgaaatcagtgtaagttcgagaattacatttttctcgcctctccgaaataatcttttatacgatttatcccactttaacacaccaaaagtcctctcggattgaatgcttcgattcattcttaaaagagctccatgtatggacgtaagattgttcagaacttcctgatggatagcggttaactcctggttcattcggatggtccgatttttatgtgccctcgggcagcattcctgcttatgaggacacccttcacaggattcgcattcgtacagttcttccgttcttccatatttactatatttcacaggctgtgttctcttgaagagaaatttctgtccgtttgaacatatgagattcccatctgtatcttttgtaaaatttacagcacgatatggattttcactatattttttgtccgtcgtttcttttttatacatggtaaatttcatatatttttccatgccgtgttcttcacaataaagataattattgtaagaaccgtatcctgcatcggcaaccggatatttcggataatgaccatatgaacgattgaatttttccaccaaaggcacaaaacattccatgtccgatgcataaggttttacatcgattacggcgatgtactcatcgcagatggctgtctgcaggttatacgctgggagcagttggtcatttcccatgtaatcacgtttcagtcgcataaaagtcgcatcctgatcaggttaagccgatggtctcactcactctcaggcaagccccaagcataacctgcatcattggaagatgaggcttatacacattactctgttccacaaacttcagaagttttcctgctgttccagtgtcagtgcttctttctcctttgccggagccccataatctcctagtgttccagttaccggattcttacggataatcccatcttctactgccagttcaaaactgggattcaataagccataaagacctttgatcgtactgtgtgccagtccttcatctgacaatgtggaaaagaacgtccttacgtgagatgtcttaaaatccacaacatgaatgtttcccaaagtatttcgtatccggtagtcccacatacggatataattctttttcatttctctttctttttcaaaccagccctgccttgtggcagaagctccgactcgtaacaactaaattgacacaatcagcttaatctgcgaatcagtttcaggattctgtctgcacaaagacggatttccttttctgtaagttttccttctttatacgcatcacgaatgtttttatcatcatccggattccccggcataataatatcatttcctgctgccacacaaacccacggaatgcttccatcctccggtactgttgtattccagtcagacattataactccgtcaaatccccactcttcacgtgcaatccttgtacaaaggtccttgctgtttgctgcatgcacaccattgatcagattataggaagacatgatcgcagttggtgcaccctctttcacggcaatttcaaaacctctgagataaatttctctcaatgtcctttctgatacgtgtgcatcaacacccattctgttatcttcctgattattgcatgcaaaatgcttgattgtaacaccacatcccggtctgctctgaactcctctggtcactgctgctgccagtgtgcctgcaaggaatggatcttctgaataatattcaaagtttcttccacacagcggatttctgtgaatattcaatcctggtgcaagccagagattaatatgaaattcttccatctctgccgcaaccttccgtccaaactgttccatcagttttttgttccaggactgtgcaagtgctgttcctaccggaaatgcagtacaatactgatagtaacgttctgcgccctcatggtcttttcttccaacaagataaccattttcaagtgaaccaagcacacctgttccataaactgtatctttctcacggtctacttcataagtttgctgcaggcggattccggccggtccgtctgccatgatcaaagatgggattccgtattgatcaaacagtgcttcactcgtctctcctgctgttcccggcactttaattccagatgctccaagtgtacttctgatttcagacatatttccatacagaagtgggatcaaatcttctacaggaatctccgtttcttctgaaaatctgcatactttcttttcttctgcctctggttcaaatgatacgttcggaagttcctcaagtagtgctgtccattcttctgcgcgtctgcataattcttctgcacagtctttgatttcaacgacttcactatgatcttccagtttctttgttttctccatcattacatcagcagatacctttacccccgctgaaagttttgcctctgacaagctgtttccaatccatattccataagcacctgcctggattctccactcctgctgctcttccaaaaagcttgcgaacgcctttgcaggaagaacaatattcagcatctctttctctcccggtttcagttcttctgtcttttcatatccgaccagacgacggaattcttttctgcttccatcctgaggaagagaagcataaatctgtacaacttcttttccgctgtatgttgttcctgtgttttctacctcaacagttactgtcacacctttcgaagcagtatttataccgcaaagtcgaatgtcaaattctgtataagacagaccataaccaaatgaaaataatggttcaattccaaagctgtcaaaatagcggtatccaacatagattccttccgcatattcttccgtctcaagatttccgttcaaatagctgaactcctctgctgccggacaatcatcgtagcgttttgtccatgttgttgtcagctttccactcggtgtaaattctccaaacaatatatcagcaactgcatttccaccttcctgtccaagctgggaaatattcaggatcgcacatatattttctgttccagccagcaggtctgtaagttctaccggtccacctgcattaatgatcaatacagttgggattttctgctcattcaggaaatacagatctttttcttcctggtcactcagataataatccccttttctttttcttctgtcctttccctcgccggaaatacggcttacaatataaactacgacgtctgcatccttgatgtcttcatttgtcaccgcacggccatccggcatggcaaatggattggcagcataggcatcaaatggattgtctacatgttttgcagcttctaagatctgctccttccactctgttctcgcctgctcatagcggttgtgataatctttcagccactcctcgcttacaatatcagcgtttttttctttcattccggcatatatagatacactttctctgttatttacatctccggaaccagtaccacctttgatcgtcttctctgccccaattcccaaaagtgcaatctttgtatctttttttaatggaagaagtccttcatttttcaacaggacaattccttcttctgctgcctcacgcgcaaacactgcatgatctatttcacgctggcaaacttctgtacttcttgttccactatgtttcaaatttgtttccatttacacatctccttaaataaaccaactgtaagaaaaaagctgcccactaaatgacagccttcctccaacaacttaactcttattattcttttactccaccaagagtaactcctgcaataatatatttagacaacagcaggtatataataatgatcggcacgattgctactgtgatcatcatatagattttacccatatcaaagttcatatagtctgctccacgaagtgttgcgatcaggatcgggactgtcatcttattctttgactgaatgatcaaagccggaacgaagtaattgttccaggaaccaacgaaagtaaagattgcctgaactgcaattgccggcttcatgattggaagaacaatgtgattaaatgtcttaaattctccagatccatctattcttgccgcttctacaagagaaatcggaagggaagactgcagataactgtacatgaaataaaatacagccggtgatgcaattgatggaatgatcaatggaagcagagaatcatacattcccatgttcgtaaccaatttcaggaatcccattgctgtaacctgtgtaggcataacaaggattgccataataaatgtaaatgctacttttttccctttaaaatcataagcataaagtccatatgctgtcagagctgaaaaataggtacataatgctgctgaacaccctgatacgatcaaactgttcaaaataccacggaacatcgggaagcttccgtcattcgctacattttttagatttgtaaagaaatattttcccggcagtgctgagaatcccttctgcagatctgcatgagaacgtgttgcatttataatcaacacatagaagaaaaacagacacataaaagataacagaatcaatacggtatgtgccagtatgctacgtccacaacttgactttgtttttgatttcattatctctttctcctttctgcttttgctcttttcttagctgctttcttagaaccatccggatcgttatcatttgtcatacgatatacaaagaaacagaggattgcacttacgacaaacagatatacagaaagtgcaccggccattccatagtttttgctcttcaaatgactgttcaggaacatgatcagagtcatggatgttctgttcgggttaccctgtccatttgtcaggatctgaggaacatcgaacatctgaagtccgccaataatggatgtgatcaatgtatatgccagaattggacggatcaaaggcagtgtaatatagaagaatctctggatactgttacatccatccaggtcagatgcctcgaagacgtcctgactgattcccatgattgctgccatcaacataatagttgtatttccaaaccacatcaggaagttcataaatccgatcaacgatcttgttccaaatacagatccaaggaaatcgatcggttttttcaggattccgattgacatcagaattgagttaatcggtccatttgttgagaacattgtaaagaataacaatgcaaatgcagatgccataatcaggtttggaagataaatgacaactttgaaaaactgctgccctctaatctttaatcggacatcagtgaaccacgctgcaagtaccagcgcgatcacaatctgaggtataaatccgatcatccacagaattaaagtattcgctccatatttcagcatatctgaatgaagaagactcacatagttttccattcctataaaattcggtccaacctctttaattcctgatcggtaatattcaaagaaactataccttactgtatcgatcaacggtatcaatgagaaaataatgtatgttacgaaaaaaggaagaataaatatatatccccattttccataatcaatactttttttctttttcttcataatggttcttcctttccacaatatcttctaacagaacagaggctctgctgtcacagagctccctgcgttagtatctgttcattccagacattattctggccaaacaacctctgtaatgtcaggataacgttctttaattgctgtttcaaagtttgattttgctttctcaaagtcaactttgccctggaagtaatcgctgaatgagttctggagcaactccacacatccctgatcgtaagcggaaagtggtgcgatcttgatgttttcagcaactggtgcaaaatactggaatgggttctgtccgccaaggaattctgaaccatatgtagcatcatcgtttgctgcttcctgcataccggattttgtatttgtaaagtctgagtaatcctgggagatctttaacagattatctttttttgctgtcatagaaaggataatgtcttttgcatgttccggattatctgtacctgttgcaacatggatgtaagatcctccccagttgtattcctgcggtgggtttgttactgcccatacgccgtcttctccatcccagttcggtttcagtgtgaaatcaataccccatgccgggaagaggaatgcaaatactttggactgacttcccattgctttgttccagtcatcattccactgaccttttactgtcgggtttaagtaacctgcatccagccattcttttgaatcattaatccactgcatgatcattggatcaactgtaacctttgtgtctccatcttttacccatgaatcagaaatgttgtttccatagagacggaatgtatcagcataagaagcaaatgcataatatcctttctgcttcagttcttctgctgtctgtttcatagtatcccagtcttttactttttcacctacagcagtcggatcgtctgttccgaatacctcttttgcaatatcacgacggtaaaccattgttcccggacagcactgccatgtagatcctctctgaactccgtctgcatcagatgctgttgttcttgtgaagtcgtactgatctgcaagatctttatccggatcaattccaagatccttcagtggcattgcagcgtctgcttcagcatctgtatatttgtatacatagtctgtctctgacaggaagatatctactttatcatctgtatcagcatctgcctgtttcataagtgcctcatcaagtttctgctgataaacaccatcctgatttggattgatgatccagtggatctctgttccatctttcaatgttgtaacagttccatctttggatgttgactcaacttcaggatatacagcttccagtctctcacggaactcatcattccaagaataaatgttaattacctttccttcttctgtactggcctctccgccattttcccctttgcttccacatccggcaagtaatccaacagcaactactgttgccataagaatcgcaacaactctctttttcatttataaatcctcctttatctaagcactctgctatgcttttcttgttgttgaactaaatataccatcttttttcctccgattatattatttatcttaacaaaatatcaaattcgtgtcataatataaaaaaggaggttttttatggctttatctaatgaatggtacaatgcagaactcgaaaacagcgaattagaaacgcttcacagattaccaactgtagaatgttctttctataatgctgtacgctccggcgacatggaagcagttattaaaaactgttccgaagatgaatttattcgcctagaaggaacaggtgttctgtcccgtaatgcgcttactaatataaaataccactttgttgtcactgctgcaatgttgacccgttattgtatcgacggtgggctcgaaccagagcaggcttacaggctcagcgacttctatattctgaagatggatccctgcacaacgatccgtcaggttgcagatcttcaccatgagatggcaaaggattttacaggtaagatgattcttcagaaaaagagttccattttatcaaaacccgttatgcaatgtgttgattatatttacagtcacatcaaagaaagaatcacgattcaggttcttgctgaccacaccgaactttccacgaattatctttcacgcattttcaagcagaatctgggagtctctgtcagcgattatatccgtgagcagaagatagaaaaagcaactcatctgctgcgatactcagataaatcaattgtagatatcgcaaattatcttgctttttcttcacagagtcacttcatccagacattcgagagctttaccgggctcaccccaaagaagtaccgggacaaatactataaaagcatgtggtaacatcagatttcttctcagaagaattttcagattttcccacaaaaaatactgtcagaaagcaattctctttctgacagtatttttatctttttttaatctgtcgattatactaattcaatttcaatcttatgtgtctctttcactgaaagcatctgaatctctctctttgaaagtattgtacacctttcagctgttatttctaatgcttttccatcgcaagctgctttccggatcttcaactgattaaattctttcttttctttattatagaatataatctcaaagttccttccggcaaatgtcatcttaagtactgcttttccatcctgattatactgttccggcataagtgcaggtgcgatcttcaagtcaccgcaatctcctttcacaccaaacacttctgtgatcatggtaagcatataccagcttgcagcgcctgtcagatatgcatagaggcctcttccctgattatcaaaatattccggaagtccaggatacatcttactgttatcaaattccattgctgcatctaaaagtgcctgaagtactttatttccttcttttgcaaatcctctctggtacaatgcatttgagtacataacagccatgtgtgagaacactgctccattctctttctcgccataagcaaatccaaacattcttccaagatcaaatttttcctcatggaagtttgtgttcaaacggtatccgccggctttctgatcataaagatacttgtctgcactcctgcagatagattccacctgatcttctgttgccgttccactcataatggcaaatacttgtccggtcagcatcattctcacgctttcatccataacgccttctacttttctgccatggttatcataatagccattgaaccagccatcttctccatccttcacccattcgttggcacggatgtttttcatcatccagtctgcttttccctcaagattagcagcaagttgatccagtcttacaacaattgtgtctccactgatattatgttcacatttctttgcgtatcctgcaaggagtgcctgcttacgtgctgcatcttcatacagttccacgcttcctgcaagaagatcttccatctcatgtgcaatttcaatcttgctgcttccactgatttcttccaactgacggagtgtttttgcaatatttctcaaatttccggcataagcacaggtaaatgcaacactttcacccttctcccatgccatgtccagtgcatcattccagtcggcaccatgaagacgcatttcattatgctctcctacatcatagaacgcacacagattctgtaaaagaatatgctccaaaactgttccgaaataaatgtggtctctttctgttttctgcttctgtccatattcgctgttccaaaacttatcatgtgcagtacctctcatagactgcaaatctttaaaatacggaaccttttcaaacagaacctccatatctcctgtctgatccagatacagacgagtcgttacaaatggccagaatgcatgatccatccagacacgtgtaatattgtttctgtctgcaataaactcaccctgcttatttccgatgattgtcgcatttgttccatcaattcttactccgccataattatccacgatcatctgacggacgcttgagggattcataatcagaagtgcaaggcaatcctgccagagatctctccagcctcttcctccttttccataatcgtgatatggaaggaaggaacatccataaattcttcttaaaattggctggaagcaaatccacttcagataattgtctgtagcttcatcaccggtttcaaactctacatttactttttctgtccaatactttttcactttggcaagctcgttttccgcttgctccttcgtaccaaatagagtacagatttttgaaatggaagccttttctcccgttgctccggcaagaacaacatactctattgattcatttgcttttaattttctgcgttcaaacctgaatgccccaacagcctctttcccctccagatggcagcctgcggtacatcccgttttttctacacgtactgcttccggaatcaggaaagaacctccctctccaataaagctttcaacagtcggataaaactccttcggggcatttccttctgctgtaaaaccatatacaaaataagtcgtatcatttttctgatgtccacgctcatcaaaggataataccggtgtaacttctacgccacattctttcgtgtcgattctgtgaagaagtgatgtaacatgtctgtggtcgcggatattatctgcacttcttccataaaccggaatggcaacgatcggtgttacttcctgttcttcttccgaaagatttgtaatcttgatcagctggatctctgttgtgccatcaatagaaacaaaggatgtgatttctgactgaagatcatatttttttgaagttcttgtcaacttctgccacatcattcctgcttccagagtgctttcatcctgtctgtctgtatatttatcaaactcctgctccgctgaaactccacatgctgaccagtagccttttccttctacccgacaccagaaatttctggtgccacggttattgtgaaggttttcaatgctgacaggttcgagaaggaaatgattctggtccgttttactatctccccccaaagttggtgtaatactggatttcagaccttcttctcctgccagtggtaagtaaagtccactataattttccggatttgtaatcgtaaatgttccgtttttatctgtaaaattgatttttctcatgtccaatccctcgtcatttcatttaagaaaggaataattctacctctgttgtctttgttaacttctcctgtggaatataattatctttcatttgttctccatttacgaaaagtttttcacatcctgactctgcatgccccggatttttcacaacgatatgtagatgtgaacctctgaaatctttttcgatttcaaattcctcccactctttcggtactgacggagcaatcttcagtccatagaagtctggccgcattccgagaattccttctacacatcccaccataaccgtagatgctgttcctgtcagccagtgtacatgagaacggccgaagttcgggctgtgttttccttctgtaaactgtccatagcagtatggttcaagtcttctgatctctgcacgattattctgtgcagccggtgcattttcaataaaatagttaaatgctctctctccgtgtccacgaagcgcctctgcaagaatgatccatccctgagactgtgaaaaaattcctgcattttcctttgttccggcattgtagatcacagccagtgcaccgtcaaatgcatgtgcatgatacggaggatccatcaggattgcaccatattctgtattcagtttgtcatatacattctgaagtgcaagatctgcctgcgcttcatttgcaagcccactgatcacagaccagctctgtgggttcagccacatatttgcctccggatctgtgcgctgtccgatcacttcaccatcctctgtgaagccacggataaagcggtcttcgttccaacagagatcctggatcagtttttccagcttcttctgactttcctccagataattcagatattctgtgtctttcttatactcagcaaattccttcaaaattgtcattgcatagtagaactgtaatgcaacgaaggttgactctccatcttttccgagtcttaagcagtcattccagtcagcataaaggcctgccggcataccatgctttccaagatgattcatggagaaatctactgcacgtttcaaatgctcgtacacggtaccttcttctttatttgcaaacggaatcacttcatcgataaattccagatttcccgtctcggaaatgtatttgtatactgtcgggaacagccacagcgcatcatctgcacgataagccgggtgtcctgtctcctgcacataagaagcatcatccggtgtatcctcatgtcccggattgtgtgtgaattttacaagtggaagccctccaccattatttacttgtgcagaaagcatgaagcggatcttctctactgccatctccggtgccagatggatcacaccctggatatcctgtactgtgtcacgataaccgtatccatttctcagtccacaatatgtaaaggatgcagcacgtgaccagataaatgtcataaagcagttatatgcattccatgtattgatcattatattaaattcttcgcttggtgtcttcacctggaaatgggacagatgtccatgccagtactggattaattcttccagttcatttctgcagattgtttcacaatcctcataacgagacacgattgtttctgcatcaacatcttctttcataccaacaagaaatgctatttcttttgtctctcccggatataaagtcaggattgtagctaatgctccacatccattttcattataatttccttcacaatttaaaataccatcttccactccgaccggattgttgtatccatgatatcttccaaggaaaccttccctgcttccacaccaggaatcaacctttgcacctgcaagtccgaagaaacggtcaacaacgatcttgtcatccacatcttttccatcttccagctgatccagattggcatggatcatctgccgcacacggtttccacggaacactgttcttgtaatgaactgagagtactgaagatttacctgatcctgctcgtaattgctgttgtttgtaaattctgcatagcctgttacattgatcttgcgcatgcgatccgaggtatttgtcactgcaagattccacacttcataagactgattcagcggaacatagtatcttacttctgaatggatctcgctataatcagccatcatctttgtgtatgctgtaccatgatgacattcgctcttataagaattcagatcttttcctaccggctgccaggaagctgaccaataatcttcactctcctgatctcttaagtagatatatcttcccggctggtcaaactgattgaagacatatcttaaaattcttccgttcgctcctgattttgcaaagctatatccacctgcattattagaaataattgctccatattctggagatccaagatagttcacccaaggtgccggtgtatccggtcttgtgatcacatattcttttttcgattcgtcaaaaaaaccatatttcatacttcacattctcctatcacacttattataaacaaattgcagccattcctactatctgcaattctatctttactgtgataaaagaatatcaaatcagaacacattaatatacaaaataagaacttaaaatatcaaattcgtgacatgacaaaaaggaatttaccatatctggttttcctattttctgatgtccggagatagaaatttcctatgacctgattgtccaaaattggactatccacccttaggcacttctattctccacttaatcattttcttctcctaatggaacttcccggataatatattcggtatcgccataaaagccatactcattacgcaatctatgacgttccacatatccatgatgctctaattccttaattgcagaacgaacagaatcaatcccatctctgctcaatgttgccagtccttgcatattgtaattccagtcatctggcaaacttaacatcagcgataatagacctttcgctttcaatgtcagattcttattcttgaaatggtgattattcattaccgtaaaattcttagttctctctacacgaaaaatctgtgccattctatctcacttcctttccagacagaaaaagacgcaagccacatttctatgactcacgcctttctctgcacttcattattaaattgaaaatttctattcttctttcctttgttctaacaattctctcgcatttgcaatagcaagggatagcttctgttctaaaagttcttttggaggcattttggtcatatactgtcccacatgaatatttccatgatccaattgcattaattctatagtttcctgtgatttttctgcacataatataagtgcaaccggactttcttcaccttccactctttcattcttttccagccatcgcaaatacagctcgacttgtcctttatcctgcggttcaaattccccaagctttagttcaacaagaaccaaccttctcaagcctctatgatagaataataaatccatatagtagtccttgccatccagtacaaaatgtttctgtcttgctaaaaatgcaaaatccgatcccatttccagaataaatttttctaattctgcaagaatagcattttctaaatctttttcactataagtatcacgtaaaccgagaaaatcaagcatatatggatctctgtaaaaaagatccagactcatttttccatcatctcgtaattccgcaatttcatttttaatcgtttcttctggtttcttcgatattgcagttcgttcataaagcatggatttttttctttcacgcagtgttcgcactgaccagttttcctgcatacacattgcggcataaaaatctctttttaactcatcttgtattggcagaatctctacaaaatgcgaccaggtcaattgttgcgacagtgtcgcaactttttcaaagtcaggaaattcctgataaaacttaatcattcttgaaattgatgttttatcaaatcccgaaccatactcctgttccagacgtttactgacttctgcaacaactttttttacattagttttcttttctctgatcaacgcatttatttcatcataaatgttatcaatattaatctgctattaatatctcttttttcattgttgattcccttctataacttgaaattccaaagtagcatttcaaaaccataccaactgcttgctgttatattaccctatttttctcattatgcctactgctatttcatgttcacatataataatgaggtcgcaatccacgacctcatcaccttcaattaaacataaatcaattccttaagaacaatctcttccgcaatcgctctgtgctgattggcctctcttacccatgccatctgatctttttccttatctggcaatgattctttttcttccaacagcttcaggatcacttcttcccgttctctggctgacttgtccatttccagaagatattctccatattaatatctttttctccgatatgttcatacatatttttccacattcataataaaatcccagcctattgccacatggttgttatcctcttccgtgataaaatcacagactttcctcaattttcatactatacttatactactaaattcaggaggtaccagaatggaacaaaaaatcagaaaaaagaaaaaggctcttgtcagcgctcaggagtgcgttgcctgcggctgctgtattaaggtgtgccccagaaacgcaatagaaatatggaaaggaattatggcaaaaatacatatggaaaaatgtatcggatgcggaaaatgtgccacagaatgtcctggatccgtaattttactccaggaggtacagccatgaaaaaacactggtatgactatctgtggattttatctcttacatacctgatccttggattttttaatattctttttgcgtggcttggacttctgtgcttttttattcccctgattatttccatagtcaaagggacaaaaggctactgcaaccgttactgcggaagaggccagctcttctctttgcttggaggaagatttggactttcccgcagaaaagatattccaaaatggatgaaaaacaaatggtttcgatatggattcctgattttcttttttatcatgttctttcagatgctttggaatacctttctggtattttccggaacacgcaaactttctcaggtcgtaactcttctatggacttttaaacttccatggaactgggcttatcacggtacgctgttccatcccggcactgcccaatttgctttcggcttttacagcgttatgctcacatccacgatccttggttttattacaatgtttctctataaaccccggagctggtgcgtatattgtcccatgggtactatgacacagctgatctgccgggccaaaaacaacagtcgcacatgttgagttttatctgctttttacccatccggtctattattggagttctttatccaagaactccaatgttacagcctgtaccagatccatatttttaaatttctccggcgtaaaataatcctgtactgtgcaggtctccatttcagttccattatcatatatcattatcgctaccggaatttcctgattcaattcaatcttctgcgcttccttcagaaatccctttgtactggctacatattcctgacccggctctgtatcctttactgaaaaagaaatctgacctgcaaaattgatatgaaaatccatggagcgatcttctcttatttccatagcaaacgttccattagcctgctccccggactcattcatagtatctaaataaagcgctccatttccaatctcttcccaggaaaaatctttttttaactgataaacacttgcttttacagcgacagcttcttcgggagtacaaaaagagaggatctgtgaattgtctgccataccaaaagcttccagaagatgctgctccttctcggaaagtacatagggagtaattatctcttttttattcatcaacgaatcttttcctgcacatgcactgaagcctgccaatagcccgaacactacgattcccgccaaaatttttttcatctgaatttccctccctgttatgaaggtagtgtcaaaaactacctgtttttattgttctaaaatcctttaaaaccttgaattacaggaggtttacaaataaaaagagcattgacctcccttttctggtataatgtcaatcgccaaaccaacatccccgaaaggagccaatgctcatgaacattatactttatttacttcagctaattcaataccaacatcaacaaatctgctggcttttaaattttatctgcagatatatccctctcaagcagtgggccttcgatgattcccactctcccaaatatcaaaagttcaagattgattcactccctctgatcacggatttccgtcaggactggacttacaaagaactcatcccttactacgaaaagcgttatggtaaaaagatccgcccgatcagccgccggtcagagtgtgacattccagattcctgcacctgcccacgctgtgatgctcccaaacccttcctctaccggaataacggttccaaaggacaactcctgtgtaaaatctgtgatgccagattttctcctgatgaaagcaggttctcttccgtaaagctgcgatgtcctcattgcggcaacaccctggttcccaaaaaggacaggaaacacttcattgtccataaatgcgtcaatcccgaatgtccttactaccttcacaacctcaaaaaagttgacaaggcagatctcgcagaggattatggtaaaaataaatataagctccattacatctaccgtgagttcacgatggattttttcagcatgggcttaaataccctgcctaaaaatgcctcttcccttaaattcaacaaacacaatgcccatgtcatgtccttatgcctgacactgcacgtcaatctggggctttccctgcgcaagacgtcacaggctttaaaagacctgtataacatcagcatttcccaccagcagatcgctaactactgcaaaaccgctgccatctgtatcaagccctttgtcgaccagtatccttacgagaaaggggatgtcttcactgctgatgaaacctatatcaagatccgcggcatcaaaacttacgtctggctgatcatgaacgccgccacacgttccattctcggctatcaggtatccgataaccgtggggttggtccctgcatcctcgccatgcgtatggctttccatgggcttgcaaaactcccggaaaactttaaatttgttgcggacggttacagtgcatatcctcttgctgcaatggaattcgcaaaaaagtttggtaaagactttaccttcaccgttacccaggttcttggacttaccaacgacgatgctgtttctaaagaacaccgccctttcaaacagatgattgaacggctgaaccgcacgtacaaggcttcttaccgcagcacgaacggatttgataacatcgacggtgccaactatgacctggctctctgggtggcttactataacttcctgcgaccacataaacatacgggatataaagtactcaaccaggtagacatgctccagggagcggataacatgccaggcaagtggcagcttctgatcttccttggacaacagaccattctgaatatacagaaaaacgggactgctgcaccggagcggaacggttgtcaatagaaccgtggaataccacaacagacggctatgccgactgtgaggatatgccgcgaaagtctgttgacaaaaagttcccggatgatcctgtccagcagaaaaggggcaactgcacccttttcctgccttccggcgaggatagattcgggcaatgcccgaaaatgggtcaagggactggtcccttgtaggttctcagggcaacgccctgagccctcggagagcttatcggaataaatatctgcaattttcaaggttcatttgagtctttttctttagctctgtttttcatagattatttgacactaccgttatgaaattttatccgctgtattaaaaaccattctcctgtattctgtaaaatctactatgttttgattataaacattttcactttgatttgtcactacatttcgttattgtccatacaaaatatgctctttaatctgcttgtttggttaatcaagtatttctttttatcgtttattacaggtgctccctcttgaacactcccactaaaaaacagcctgctgcaaggctgttttttagtgtctgacttttattttttcaattaattacttgcctctatacactcgctgatctcctgcattctcagatcaatcgaatgaatactttctgcacatccccgcagtttttctacaatatcggaggtagaggcatcaatgtcctttttgtattttactttatgctcaatacttgcccagaaatccatggcaatggtacggaactgtacctccacctgcatccatttcttttcgtctgcaaaaaataccggaacctccagaatcagatgaaggcttcgatagccgtttggcttgggattctggatataatcctttttttcgatcaggcggatatcatcctgtgaacagattttttctgcaagtctgtaaatatcctttggaaaaaagcagacaacacggattccggctacatcatgcagattcttttctatactgctgagacttacctctacgcctttgcgcttcagtttttccacaatactcataggctttttaatacgacaggaaatcgattctatgggatttctgtcactgtccatagaaagctctgtatttaaaacttcaaattttgtctgtacttccagcatggcgcactgatactgcatcatcagtttcataaagggctgggccgattctataaattcttccggtctctctcccgctatcagttcgtcaaatgtaaaaccacttctgttgcttttcaaatttctttcccccatttctattataatccggcaaaaaacagctcataaaaatcgtcttcgccctccagtacaggaaaattttcgcctccgccgttggtgcttcttttcatggatgcataaaactcttctcctgcgctgataagctccatttcataaacaggatatccctgctcctgacattttttacaaaatgcttcaagaggatgttttgcttcccttgtttccagaagctcctccctgagctttttatctctcagtgctttctgtttcagcatgtcaagcatttccgctacttccatatcctgatctcctttgctgcttctttatatcagactttgttaaccgcttcatattttaccataacagaacgccggggtacagaattatttactctaaggtcagctaaggtctgtttcctgccagggcccgttactgttcgttcagttcacagtaacctggtcaaaatacattttcggtgatgacattttgccctgtatgtgtcaggacagtgacctgtaaacagtatccataacctcacttataacgccatttttcttttaaataaatgccctgctgtcagagaaaatacagcacatagccccaggcaccagcatgctgccaaagcaatatcagacagatcagccttatttcccagaaatgcatttctcatagtatcaatcataacagtcataggctgatattctgcaaaggttcgcaccacaggcggaagaacttctgccggaacaaatcctgagcttaaatatggaaggataatcgccactgccgacaaagagcttgccccttctgcgctgctggctgtaagtcctgtaataacagccagccatgacaatgtaagaatgctgcctgaaatcaacagaaaaacaatcccccagtctgatagatccgaggaaggccggaatcccataagcgcagcagctagcagaacaattcctgaggttatcattcccctcacaaatgcctccagtacatatcctgtaagaatcgctcctttttttagaggaagaatacaaaaccgctctgccattttcccggttatgtctctgtttacagaaacagcagtggttgccgaacactgcccgatacactgtaaaaggattcccggaacaatataattcacataagatataccttcaatccggatcacttttccaaacagacacacaaacagcaccatcatcattgcaggaagcatgatgcttgtaagaattgtatccggatttctgcctgaaagaagcagacaacgcccggccattgtaaatgtatccctgtaattttttgcatatgatctcatactattttttctccttctcacaaatcatttcaagaaacacgtcctcaagacttggctttacttctctgaaatcgcagatgtgaatcctgttttcataaagatgatgaaaaatctctgccagcttatctttttctcctcctgtaaaaacaccaaacccataccttccatctttttcctgaaaaaacccggattctttttcagagatccgtatcattttattttgcctcacaagaagctttgctttttctaccgtttctttgtccgcaaaaataaattctgccgtctcccggtgaacctgaccttttaattctgccaccgttccttctgcaataatttctccctgatccagtatggcgattctgtcagccagctcttctgcctcttccagatattgggtagtaagaaaaatcgttattcctgactctttcagttttcgcaccatattccacatgcttcttctgctctggggatcaagtcccgtggtaggctcatccagaaaaaggagctgcggatttcccagaatactcattgcaatatccaatcgccgtttcattcctcctgaataggcagaaactctgcgatcccctgcttctgtcagatgaaattccctcaaaagtttttccgcgcttttttcaggatcagaaagatgtctcatttttgccataagccttaaattttctctcccggtaagcggctcatcaactgcggaaaactgtccggttacactgatgatctgcctgatcctctccggctgagactgcagatcaaaaccaccgatctttatttttcctgcatccggagcaagctgtgttgtcagtattctgaccgttgtggtcttgcctgcgccattagaacccaaaagcgcataaatacttccctgagccacagaaaggtttacgtttctaagaacctctttgtctttaaatcccttttttaatcccattactgatatttctgtgtttatcataaagctctcccttctttttcatacatactgaacgaatgtaaattcttaatataaaattgccttgtatacacaggcaattttatctatttcatgactcctgatcataataaggaagcttgctgatcatttcttcaatttcctcatcataaagctcaagtcctatttttttcagcatttcagatataaaccgatattttctactctgctctttggcatctgccggaaaaagagagggaatcatccacagatccagaagaaccagaagctctgccatttcctttggatactctgtctggacagagccatcctgaatcccctcctgaatcagttcctgccagtaaggacaaagaatcctgcggttggattcaatcattcttgcaagaacatgaggatttttcaaaatcggcactgcctgtctggtcagttctacctgctgctcatctgactggttcatctgaatagcaagcttcattttttgcaaagcattcagatctgtccgtttctttactgcctcgaaaggattatgtgtaaaaaagagcttttcccccagagcatccataatttcttcctttgatctgaaatgatggtaaacagccccttttgtcagaccgccaagctcatttacaatatcctggattgttgtattgtcatatcccttttccagaaaaagccgctgagatacttccagaatcttctcaactgtgatctccggatatttatttcttgccatgaaactctcctttacattctcttcgtatgtttcttttattataacctgcagcatctatattgtcaataattacattctttgcgaatgtattttcctcagtggcttttccttctgttttctcccatgtcacttttataccgcccccgcatttttatgtaaagtcagttttataatataaatgagtaactatcgaattttgcacaatagaagccgtaatatgcggacataacaaatattaagctgtatgattctgcggtttgttctgttccagcaatctgtaagccggtttctgaattacttctcttttttgtattcttctatataatccagaatctccacggggtcttccataaaacggcagagatcaaggatttctctgtccataaacttctcatctgctgtatgctccagaagcgctttcatcccgtcataatatccattgatattaaaaagaacaaccgggcggtcaattcttccaagacttttcagtgtcaggatctcaaaaaactcttcataagttccaatacctccgggcgcaactatggtagcatcggatctttcttccagaagctgtttccgctctctcatggtttctgtaaaaataaactctgtacaatgctcatacagaactcccggctgatcgaaaaacctgggagcaatccccaaaatatatccgttttctgaatgcacgcctcttgcggctgctcccatcattccggttgctccccctccaaacacaagtccgtgtccctgctttcccatcagagctccaagctcctgtgtctttttgtaataaatttcttcaagccttgcgctggcagcgccatatacacaaatattcatgatatcctccctgttgtcctgaaaatttacagttatccacatacagtcctctgactgcctgatttttatatcagtttaccacactctgcctctacagtatataaaaattccctgcaataaagaacagacagaacgctcattgccgttcacagcaacaagctctctgtctgcattataatgggtctgccaataaaaacaattccataacctttactcagataccacctctgaaacttcaaattctgcctcgcagggctctgcatcagaaatattttgctctgttttttgaacagaaacttctacctcaagctcccgggcaacctgatccttatatttctttccggtaagaaggactgcactggtaagcgctgtaaatggcgcaacggtcacaagtccaaagcttcccacaatggtatccagaatttccgctgacacatacttgtaattcagaatattctctatgggtgttccctgtgccataaaagtcataagaagcgcaatatagccgccggaataggcaagaagaagagtagttgtcatggttcccatagccgcccgtcccacattcatgccggaacgcgccgcctctttccatccgatagaaggctttttatgcaccacctcattcaccgcagaggtgatatccacagcaagatccatcatggcgccggaagctccgataaaaataccgctcataaatattttcgtcagattcagatcctgatagccggagtataaaaggctctctgaatatgccattaccgccccgtggattttaaacgcatctgtaaaaatacacccgatcacacaggtgatcagaacgcccagaagagcgcctcctgttgccgccacggttttccggtcaaacccatacaccagaaaaataatgatcaaagtcagaaaccctgtaataagaatcccgcaccacaccgggttgatcccgcccagataagccggaacaaggattttccagatagtcagtatggtgatcacaaaggagtacactgctctgagtcctgtccatcctgcaaaagcaatcaaaagaatcacaaacatccctgccagaagaaactctttgtccaaccggtaatgatcgctcatggttacagaggtgatcccgtcatcattatagctgacaaccacatgagcaatatcgccttttttaaacattttatcagattccagagagccgctgagcatatttactgctctggttgtctcccctttgaatttgccgccaagaagctccacctgacagaactgctctcctgactggatcagaccggagctttttacagtgctctcatctgtagaaaccacctttgccttaaccttatctgttcccttaaaaataacagcatcctcatagcccgtgggaagaactatgaggatgaccatcagaagtatggcaattaaggaaacagagctttttttcagtctgtttttcattccttactgtactcctgtaattgctgccagcttattgaaaatatctgtattgtcatagtagccgtcaaactgctcctgctctgcgcccattgcaaaaacctctaccggaagtcctgtatgtgcataggaagcaaagttaattccggatttattgttcaggatatgggtaatggttacggtaagaggctcatagcttccataaagaagatactcctcctgaccgaattcttcttcctctcctgtacggctcatagtctcgtcataggctgttttcagcttgttgtattcatagtctgtcattaccagagtaccgctttcttctccctccggatgtacgtccttgctgtctgcctgattggtggcttccgcttctccctgaggagcctgcagtccaaaaagctctgtaatgtctttcataaccgtgtcaaaatctgttttgttttctttatatccagctacataatcagaatcaaactttgcataggaaattttctggttgctgatgtttgtaaggaaggtatcataatctgttcctgcaaaaccaatagtcataccgcctgtttcatgatctcctgttaccaggatcagagtctcgtccggatgttcattataaaactctactgcttttccaattgcattgtccatagccacagtatctgtaatggtagctgccgcatcattggcatggcaggcccagtcgatttttccgccttctaccatcataaagaagcctgtatcattatccagaacctcaatgcctttttccacataatctgcaagcgcccattcgccttccacacggtccatatcatagctcatggcatcatcatctgccagagtctcgtcaatgacaattgcttttccgtcttctgctgtcagcgcctctgtctcagcctgagtttttactactttatagcctgcttcctgtgccagctgatagagatcagtcttgtctccgtcctctccggcaggctttttcagaccgccgcctgcaaaataatcaaattcactggcgatcatttcctgtccgatttcatagtaattgtttctggatgcctgatgagcgtaaaaagctgccggggtagcatgattgagatttactgtggaaagaattcccaccttatagccaagctgttttttcagcttttctgcaatagtctcataggaagtttccattttctcatccatattaatggttccgctgtaggttttatgtccggtagaaatagaggttgctgtggatgcggaatccggacagaaagaggtgctgtcataggtctgtgctgaacctgctaccggaaatttcatcatattcagtttgctttcacttgtgagaatatcatctccgtcatcctctatggcattcaggtaatagtttgttgtctgaatctgaggataactcattccgtcaccaataaaaaggaaaatatatttcggtgcctttacctctgcatcctgtgctgccgtttcttcctgagctgtctctgccgcatatacctgtgccggtgccgcacatgggatcatcatggctgctgccagcagtaacgcactgattttttttgcattcatagaattttgctctccttttcctgtttctttcattttattgagattacagttatggaagccatttgcctccttacaggaacatatcttatcagtgcaaagtcaaatgtacacgcatgcccatgttaaatatacttaaaagtttttacggaatgtaaacttacagataatctccatgcaaaagatcaccacagctctgcgttgcctctccaaaaatatttctctcagtttttccggctttcaaaataaataaaacgttcaatggaatccaggatatctgcaaaatcctcccttggcgccagctcaatgtatcgggtcaaaagctctgtttcttcctttttatatcttccataaaaaatatcgtaaagattatgacctctcaaatagatctttatctcctccatatgatttttcacatcctctgttgtttccagatcctttccaagaacctctgtaagctttttcccactgctgatccggtgaagatactctttccattttgccagaaatgtctcataaaattcctgttcagaatccacgattccaagctgtgccattactgccggattcaggaaataattctcaaaagaataatatttcaggatcagcacatttttcggcattacccgcggcagacggtccacatcctcctgattccgttcctcataatatttacagagctgatgcttcagcatttctctgtctctgccgtccccgtcccggatcatgaggaagttgtccttcagataaatctgattcatatatttcagattggcataggttttgatattggtacagctgtttgtagtaatgatcgcaatcctctgaagatttccattttcatcatacatctctgaataatattttttcaaaagtagaggaagtcttgatttatcctgccttccttctacaataaacacaaaatttacattcatcagatctcctgcggaataccccagattatccagaacttcactgatatctgttttttcactgattctggcatacccgtcctctccctgaaccatctgccggatctgtctgctgttaaaatttgacagaagatttgccgcatgagtagaaaaaatcacctggctttttttggaaagacgatacaggatatccccggattcattctggagctttggatgaagaaaaatttccggattctccacaatgatcagatccgtcgcatcatccattgtttcctcacaggtttccagaagagacagcatataaatgcttctcattccctttccaagagaattaatggacttatattttttctgcttttcatcataaacctctgcggtaacagaaagcatcttttcaatatcccggttcatggaataaaaaatctgctctttccctccgtttttccgaaacctctcattcacccgtctggaaaaatcattcagattcagctgataaagcttataatccagaagtcttgccgtctcaaaagcgttcagctcctgaactgttttctgcttcagatagccaatacaggaaaaacagtgggtacaggttttggcccggtcaaacatacagcagtcagaacgcatctgcttcagcagctcatcctcctgcaaaagcagaaggttttcctgcagaaaatccagctttctctgggcgtctatataataaactcttggaaaaagctttggaatgctgatattgtttttctgataaccgtcactgtaccggattcttccctgcctgtttgccacaaactcaaaggtcagaatcccatcctgataggagggcagcttccggcaaaaatcctgataccaggaagcgtaattccggtagggactgatcatacgctttttctgcagtcttgtaagatcttcctgggtaatcctcagttttaccataatttctatattggggtaatcttccagaaaatcctcctgctgaatctgataatcgccactgactgctctgacagcatccagcactgctgtttttcccgtgttattctggcctaccaagatcaaagcattctcaatgtcggcaatatggagatttttaatggatttaaagttgcggattctaagatcagtgatctgcatagtgtgcgcctccctccggatcagatatcatatctgcttgcaaaactaaatgtttcttatatagattagcaacagtcttaatctcctgtgcaaccttctctctgttctgttgttttcccatctgaattttccaatcatatcatacttgtagtataaacttgacagagagttaagaaaaaatccggaaacattttatacgtttccggatccagtaattctttatttaagcatctctcacatatcctcatactgcatcaaatatttacagattttctgcagatcctcttcttcgcttgcaatgatctccaaatgaagttcttcacttttagagaataattgtgtcattgatatatactggcacagctttgatttcagattcagacgatcgccttccccggtcaaaagctctacatggcctttacagctgtccacaatcttaaaaaattcctgtgcatttgtaattccattaattttcatagaatctcctttacagtgtataataatctgtttcctgatatatcccctgaattctttctcccaggttttcagataatgcctttttcaaaccttcagcatctttattttttaagaaatcaatatagctctgatgttctgcaatcattttttttacgcctgtagtatttttaattacatctcgaccatatatcagcttaaaaaatgacagtgtatcccataaggattctatcactccacaaactctgtccattccgcatgtggaataaatagcaaaatggaattttctgttttgaagatacagttttttggcatctaattccttttcttccacaatccggatatattcctcctgaatattttccagttcatcgatctgcgctttcgtaatcttcctgcatgcttcaccagctgcaagtggttccagtaactgtctcattaaataaatctgcagtatatcctcctgctgcagtgaaacaagtctcattccaacataaggaacagattctgccagtcccattttttccaggcttttcagcgcttctctgatcggcatacgactgacgccaagctgacgtgcaagctcctctgtgttcagcttttcccccatcttcagcgtcccatccataatccaatccatcagcttattcagcacctgaattggtaaagtatctctctgcagcatcacagaatcatcctgattcatcgtcactcgattactcatatatcgcatactctcttatctttcatatttacagaccgagcttctccacaattttatccagaatagctacctgtgctgtctcttctactaattctgctgtatgttctgctgtaagaggatcttttcccatcgcaactacgccatgatctgcaagaagaaatgcctgaatgtttggagttttttcaaacattttttccaccataggcacatcctgcggacgtaccattgcagcatgtacatccaatgtaggaaatccctccggatttttcagtcttgaatgccatgttacaagcggaagatccctcttggaagaagaccatccgattgcatacggagagtgtacatgtacaactgcctggacatctggacgaagtttataaatataaccatgcagcaatgcctctctggttggtttccctgtcccttctatcagattcccctcaaaatctgtaatcagaaatccttctggactacagtctcccagggatcctccgcttgcttttacaagcattgtttctgttcctggtattctggcacttacatttccgccactgccagtctgtattcctctattataagcccttttgcttgcaataacaagtttttctgctatttcatatgctctctgatccatgattacatcctcctgtttattcttctccaaaatcttttggaagtttcccctgatttttcatctcttccacaatataatgagctgctttgattccaaactccggagtatccagattatgaggaatcacgatcacttctacattatcatttacattgtttatgattgtctggatcaaaatggaatcactttccggctcatataattcctgaccttccaaagtgttatgtctcattccctttgtaggaatcagtaattttaccggatatgtgaccttactcagtcgttctgcaagaatctttcctaatgctttcgcttcctccggaagaatctttatatgtgctgtatttgcattatggagcatatattttctttcatccattctgtccggaagttcgtttgtactgaaatctacgaaatcaagacctcccagactgattacaagaggaatcttcttttccacagattcaaccagacgggtttttgcttttggtccatatgagaatccaccgccaaaatattctgaagtaagttcatggagggtcagatcaagaattccatccaccagcccatttgctgccatatcctccatggttgctccaccaacaccagttgcatgaaaaccgattacttcaagccccattttttcaagttcttcaactgctgcaactgctcccgtatttgtaactcccataagagtcacagctaccactggcttttctccttttttcagaacctgccctgcacattttaccatgcccacacagcaggcacatgcattggaaataacctgtcgggttacaatattaagacctgtaaaatcacagattgccggcataacagtaatatccttatccccaactaccagatcaaattttctggttccgcttgcaacagttgttgccattaccttaggaaagcctacgggcagcttttgcattgcatttgctgccataacagtattctgaagacctcctacagaaataatcccgtctatttttccttcttcatacagcttaactacataagaggcaactgcttccttcataaaatcaattttctcgccctttgacttcggttccatctcctgccatggagttccatagctttctgcgatctcttctcttgaaatatcataattataagaaggtgccggtccggttgccgtattaatcaccagtgcctttaatccctcatttttaatgaaatcactgataaatttcgcttctttatatttcgtatcacagctttctattaccgctatcgttttcatattttcaccaattctctttctatacagatattgtgaagatcatccttttttgggcaacctccacaatatcttactacagttccttattcatattttcaattaattctggctgaaatattttgattctgctttttttgctgcctttttggcatctttatcaataattgctttcttatattcgtcaaatacaaagtctgtatctttctttccgattaccggaatcttattttcatgagaatcttcatacttttctactgctgcagacaggattacatcatgtgcaagcagaagatgcttatgaggatctactcctgcttctttacaacggcgaacggtatctcgcactgttttccatgctgcaacaatatctacataacgtccaggaggacagatatcgtaatggagttcatcctgcatttcctgcggtgcgtcaatgttgcccattacaaatacagaatctccaacacagaagtaaggtccttcctctgtttcaactacaaccgtcatatgtcccggacaatgtccaaatgactcatatacactgacacctggtgcaatctcaacttcacctttcaccgtttcaaatctttcatacacacccggctggtcatatggagcgataaactgatcaccgcatgttacatctccatcttttgcaataataggacggcagtaggatttgtaatgaagcggtaccggattatgtgcataatcccattctacttcattgcagataaaccgggcttttgtaaatttctccagatagaagatatggtcccaatgaagatgtgtaaataatacaatatctacatcttccggcttatatcctacctgcgccagacgggattcaatatcatcaatgcctggtctctgaagagaagggccgtgatgatatttatctgcatgctctgtccatgacattcctgtgtctaccagaatcagctgatctcctccttcaatcaggaaagtcatatccggaagctgatcagattcatttgtgatgcccattttctctacatattttttgcaggaaaaatgataccagtactccagtggttttgttgggatatagcctgaattaagtggtctgattgttaatgtcataataaattcctctctttcttagataaattatcttatttaattgttcaattgtattacttctccatatttgtctgtgtttcacgttcctttacggcttcatctgaataaataccgagctttttctttctcatgtgtttatcacacagagatgtaatcaccggagctgtaaatgccgttacaatcgctgcaacagcaagctgtgctgtggctgtgcttgcagttgcctgccaggttggatctacttctgccagagaagccggaacacttgttgcattggctgctgtagttccaatcgctgctcccatcgcatttctttttttcttaggcaatgtcagctggaacacaaagtagaaaacaaaagcagacaatgcggaaataactgcaagaacaactcctccaattcctccggctgcaatgctcttcaagctcattcctgctccaataggaatcatcataaaaaatgtaatgattggcattgcatcagccgcaacccttcggaaagtagtatccagatttccccagatgataccaataataagcgggatcagggttgcaataaaggattctataggaatggatgccataccggctgttcccattgcgatcatggtaaaaaacggaccgtcatttaatgacaggatagaaattgcacctgcatccgtctcatcaccatactgctgtgcaagacctaaatataagcctcctgccgagtttgtgataccggcgatcattgccatagatgtgattccaaaaaatccggcttctccacagaaccaggaaaccagaagaccaagtgcaacacccagtacaaatttcataagtgtcagtgtacagcccttgtataatggcattcctatcttcttaatatcaatggatgctccattcagtaaaagaaacattcccaaaagacaggccgttccgctcttaaacattccggatgtaaagcctccgattcccagcacattcggtatgaatgtgtttgcaagaactccgatcagcattggcacaataatcaatccgccaggcactttctgcatcatcctgaaaaaactcttctcttccttcatcctttttacctccttttcttttttggatatcggatattggatacgatttattgtatctttatattacatcctaaatagttatttgtcaatctgacgatatatataattttcaacttatatttttgtaaatttttactaaatattattctgtttgtatgtatggatagagtgccgtatcaatttgtcaaaagcatctgcatcccaggctgctcttcccacaaacagaccgtcaattgccggctgaagaatcagctgatctgcattctcaggattgacactgccaccataaagtacaggaatctgttctgcattgtctccaaaaatttcccttaatgccttttttatttccatatgcatcttctgtgcatattcggcagttgcaggaattccattcactccaatggaccatactggctcatatgccacccatatatttttgcattcttcaggatctatctcataaaaaccgattttcagctgttggcgcaaaatctccccactgatcccgtattttttttcttctgctgtttcaccaatacataacagaggacggatgccatgcttcagggcagattttacttttctgttctcttctgcatcactttccccaaacacatgacgtctttcggaatgaccgatcataaccagttttatccccagctccttcaacatacagggcgagatttctccggtaaactgcccctgatcctcccagcacatattctgagccccaaggtttatcatctgagaatcacagcaggatactgctgccggtaaggaagtataggagggaataataaaaagctccatttcctctctgttgatattttttgtattttcttccagtttcttcagatatttttctgtttcctgtatccctttatacattttaagattgcttccaaaatacagttttttcataatttttccctcgccgttaacggttattatcatattctacaaatgcatccactttaggctgagaagggcagcccggtacaaaatcatttgtaaaaaatgcatccaccagcatttctcttaccttatttcccgtagtaaaagctcccatacacataatattggcatcattactcagtctcgcccttgttgcagaatatacatcggataccagcgccgcatatgcaccttttaccttatttgcagcaatcgatacccccagacctgttccacagagcaaaacccctctgtcaaattcaccggaagccacattttctgcaactttaatagccgtgtgtgcataaacaggatcttcgcttccaaaatctgtaacctctccatagcctttctttttaatatactgaatcagctctttcttttcttcctctgcgtttggatcacagccaattgcaattttcataatttttcctcctttttcggatattggatattggatattggatacgatttatatttttataataacaccacaacaaatacttgtcaatgcatatttatttttaaacgatctttggaatatctacaggaatatttttttagtattttgtcaccgactgctttatataaaaaaacaccaccatacagaaaactatacggtagtgttttctaatcagaaggattctccttccaatcagcagctttcatattctcttttactcctcagtattacggagccgttccacaatactttcttttttcatccggttataagccagataaggcaccagagctgccagaacaagaaacagcggaagcatgatcacaaatgccaggaaattcggacgataagcaaaaaacatgatcacgttattcagagccaaaagaattattctggaaagagcagtgcccagagccacgctgatgattcctgagatcagaacataatacaggctttcctccaaaatcatccgcttcaactgctgctcggtcattcctatgctgcacaaaactgcaaattcatgctttctggcaagaattccggtaataatagaattaataaaattcaaaataccaataaaggcgatcacggcgctgagtgcaatacctatcatacggattgagccgatcatggtctggaatccctcttccagactgctctttgtcaaatatcccatatttttatttacattctctgaataatccttaactgcctgtgtaaactgttccagatattccttttctacctcataagaaataccgaagcaccagctatcaaggctgttctgtacatcctgctttggaagcaccacctgtacactattgaccggataagactgatctgtcatgcttgccggaatttccacgattgccattacctcatattctgtttccttcaggttttcccagtacccacctgtggaatttccattttcatcctttgtttctataaaatctgaatcctctgaggcctcaagaactttcagtttttctcctggttcatacacagaagcgccggctgtataatctcctataatatcagtgagaagaacgtaacctccctgggcaaatttctgcagatccagttctcccttcagtaccttcaactttggcagtacagcttcatcataggcatagatccttgtatcaagctgctgtttttcttttgcattatgaataacctccataccccattcatcctgacgaagctttccttcctcctgatatttccgataacggttcagggctttctcatccataaaaatatctgcgattccatagacctgccataattcatttttggaaatcactcccggctgtgaatctgccagctttacatagtctttgtccaattcataatcaacaactcttactgccccgtttcccacaatattcgttgatgccagcagaacatctcccagaagcctttgttccagataggcatccacacgaaagcttcccacccctgtgagaaccatacagagaagtatcgtgctcatggatagagaaaccagaaccaaagctgtcttttttctgctgcgtcccagattggaaagagccatacggtgaatctgagcgccggtttctgattttttgttctttttacggcttctgtttccctctgtataacgaatagcttcgataggagaaacacttcctgcaatttttcccggtttgcgacagctgataaatactgtgatcagggcaaacaaaattccaaatactgccactgacagccggaattttattttaagatccagatctgtataggctgtcatttccattacaaaaggaaaaataagatttgacaccgcatatcctgatgcaagtccaatgggaattcccactgccgacaaaatcagagcctgcctgcgtatcatacttctgatctgtttctttgtagtgcccactatttttagcaatccataaaaacggatatcctgaaatacagaaatataaaaaatattataaatgatcagatatccagccagcagaataataacaaacacagaacataaaaccacaattgtcagaggatctgaattttctgcccggttctgcatatacgcccagtttacaccataatcaagagattcttcccagctgtatccctcatcctctccatttggataatagcctgcttcccggattacggaacgaacggtttcctcactgttttttggactttcaaaatacaggccaaccgaatacagaccaacacctgtatcctgtggattttcctttgcccatttcttaaaatccctgtctgtaagttttcccttcagctggttccagaaggcttctgatacataaagctccgaggcatgtcccagcctgtttccctcataccagccgcacacccggaaagtccttgtgatctttttcccatgaaacgtaaattccagaggtatctcccctcccagcttatgaggaagtctcaattcatctaaaacatacgtgtcaacaataatatcctcctctttctgtggcatagtgccttgttccagtttgataaaagaattttccaactcctcttctccctgtggcatcctgatctcatactgacgtttattcagattttcagctacgctaataaaaatattccatgtataatcttttacccgactgtctgatactgttttttccatctgctccgctgttgcagccttcagacctgcatgaaatcttcccccgacctcccgcatggtagattcctgcatggcatcggaaattccggttcccatggctgccagtgtagtaaacagcatacaggtaagcgcaattgccgcaatggcaaaggtatttcgcattctgttgtttttcagacttcgcatggaaaggcgccgcattacttcctgattattatttttcatcctgctcccctcctacgatctttccgtcctcaatacggatcaccctgtctgaaagctgagccatagcctcattatgagtgatcatcacaatagtctgctgaaaccgctctccggtcagcttcagaagtcccagaacctcctgacttgtcctggagtcaagatttcctgttggctcgtcagccaggatgatcgcaggtttgcttgccagagcccttgcaatggcaactctttgctgctgtcctcctgaaagctggttgggcatactgttctttttattctgaatgccaagcatctccataatctcctgaataaacctgcgatccggcttttccccgtcaagctgaataggaagtacaatgttttcgtaaacattcagtataggcacaagattataattctgaaaaataaatccaatatttctccttcggaaaattgtcagctctgcttcattcagcttaaaaatttcttttcctgatacaactacacttcctgaggtggcatagtccagtccgcctaacatgtgaagaagcgtactttttccggaaccgcttgttccaaccactgatacaaactctccttcctccacagaaagattcaccccatccagagcctttacctgattctcacctgatccataatattttttcagatctactgtctttaaaatttccatgatcttcgcctccttctttttattttttatcatatcactggtttctgacatattcctgacaaaaaagaaaaaagttcttacaaaactgtcagaacttcattcagaaggaatacacggaagctgctgccttcgcccggtcgggaaactgccgtaacatatcctttttcattatttaaaattaactgagccagatacagtcccagaccgctgccctgcgtctgcgccgcattgccgcttcggtaaaaacgttggaaaattttattatattctcccctgggaattccgattccctgatctgtgatttctatctgggtatacagttccatcggatatacccgaaccgtaactgtacttcctgaaggagaatattttaccgcattatccagaatattttcaagcgcctctgctgtccatttaggattgtgatacagctttctgtcctcaaatgcttctaccataatcgtaatatttttatcctctgcctgagcataaacgccgcttactgcctgtccgatggtttcacgaatacctatatattccgcagaaaaggagatgatccccttttccagctgggacgctttcagcatattttcaagaagccactgcatcttttttgcctgagttccggccagatgtgtgaatctctctcgttcctctgctttaagagattcatcctccagaagctccgtatacatgatcacatttgccataggtgttttcagctggtgagtaagatctgaaaggagcgccgcaacctcatctctttctttttttgcctgaatctcttttttctcagcctgattcagaagtctctgcagagtgttttccagttttgactcctgtgtctctttcatagtagaaaaacaggctgtgcctgtttcctggtaatcccgaagcagtttctgcatacgtcttaagcggttcaggtaataaagaccaggaagtaacgctgccgcaagtgccaaaatcagaacacctgtcaatattccctgcgtcatttccgctcctcccacagatatcccattccatgaacagtttttatatattccggatgagaagcgtctttttctacttttgtacgaagccgccggatattgaccattaaagtattttcctctacaaattttcctccattatcccacacatgggataaaatctgttcttttaaaagcacctggtttttgttttccagaaaatacttcagaatacgatattccgtcaggcttaagtccagttcctcatcctctttccatactctcatttctttattatccacacggatctgccctgagataagctgcccggctttttccgactgtcctccctgcctgcgaaggagcgccgcaatccttgcctttaaaactgccagtgaaaatggtttcgcaatataatcgtccgctccgctttccagacacatgacctgatcgatctccatgtcacgggcagtgatcatcagtatggggatcttccacttttctgatatttcacggcaaagcataagcccgtcaccatccggcagattccagtccagcagtatcagatccggctgagtttgttcaagagccctgcggctgtcgctgcaggcagaaaaccgttctgtctcatacccttctttttcaagcatgaaggaaatcccctctgccagagcctcatcatcctcaattaaaaatataagcatttatgtcccgacctcctgagtcctgctgccctcaaacagcacctttgatcctgaaagaatcactttgtttttaggatatcatgatatcttccatgaagcaagacagactcaggaaatcctattatctcttcatacagatccacagtgaagcctcggctccctgtgacttatccacattatggtattctacaaatcccccctgccgtttcataaaatctgctgcaatcgaaagccccagcccctgatgagttctgtcatggcggctttcatctccactaaaaaatgcttcttttccatgaagaagggccttttgactaaatcccgatccataatccctcacagaaactctcagatattccctgtgatcctgtccactgtctgatattctgataaaatctgttttccctgcagaatcttcttcacccataatctctgcctgtaaaatttctctttcaatggtcacacagattcctttctctggatctgtatgctctatggcattgtctaccagattcccccaggctctgagaatctcctccttacagcacagaatacttttcgcttcttcagggcttccctctaaggggaagatatcctgatttacgtttttcccggaatctttttttgcttcttttttctgcagctgtttttcagtcctcacctcaaaggatagcggtatttttcgaactgctgcaagctgccttacaaaatcgcaaatttcccctgacaattcttctactgaaacttcctgccagctcttttgttccttttgccccttcagtacctgtctcatggaatccagataatctgcgataaatcctgcatttttaaggatttcctcagcacattcccggtcatcctcctgcagttctgcctccacaagaagctccgcattcccccgaactacggtcagaggtgttttgatatcatgggtaagggcagaaagctgctgttttttcaactgttcagtatcccactgggttttcagagagaccttcagagcctctttcattttttccagggaagccataacctcgtccacctcccggatctcagaggtctcagcagcaaattccagatcattttcagaaatacgcgctgttgcctcagtaaggcaggcaagctgttttttcagctttctgctaaatttcccggacaggtaacatccgtttaacacagtaagagtaataaaaactcccagcgtcagaatcatattaaagacttccggagacggaagaatctcattcagcttttctttcgcatagcgcatggcaacaaaatacttgataatacagatttcaccgttatttttttccacaaaaaaataatatccttttccctgagggtatatagtatctgttttatattttttccaggcgtccttctgcacctcttcatcaaaggttccgtaaagaaagctgccctcccggtcaaacacaccgtaaagactgcccgaaggaatcatttcctcttctgtaatatccgcttcctgaagcgtttcctttgtatttatcagctgctgctccgcgtaatttgccggaagaaaaggaccggacggaatcaggatcaaaaaaaacattaccgcgccggagatcagcgccgcaaaaaaagttcctgtcacaaacataaaaatataacggccaaacagtcctgcaagcgaaatcttcttttttcttatttccatttatatccgatcccccacacagtctctaccggcgataccccatacttctgaagctttgcccggatattttttatatgctcggtaatggcagagctgtccccctctccgtcgtacccaaatacatgctcgtaaatcctttccttggaaaagacctgtccccggttcagagcaagatattcacagatggcatactcgctttttgtaaaaggaatctccgctccctgaaaaaacacctgtctggaattcagggaaaaagacagctctcccagagttatcacatgctttctttctctgttttctctccttaggtgggcggcaacccttgctctcagctctcccaggccaaaaggctttgtaatataatcatctccgccgattccaagaccggtcataagatcggcctcgtctgtttttgctgtcacaaaaaggataggacaatctacctggtcacggattctccggcacaaactgaaaccgtctgtccccggcatcatcacatccagaagaatcaactgataatcattcaggcgccgaaaatccagtttttccggatcgtccagagtatctgtctgatatccttctttttccagggctttacgtatcacgttcaaaatccctctgtcatcatcaactaccagaatccgcgtcattttttcctcctcctattcggaaacctctcttccctcataaaaatgaaaccatataaagattatgacacaaagaaccgttcccagcaagatacaggtcagaatatctctcagatctgtattggcagctcccagagccgctcttctattaaatttttccgcaagatacaaagaagttccccgggaactccaggaacaggggaaatactgccattttccctgtccaagtcctgtcagaaacaaagcggagatcagaagctgccctatggaaacagcaatagacactgtttttgaaaaacagagattcagaaacagatgctccagataaagaggcagacttccaagccagagaaacactcctgctttcaaaaaaatggaaaacgggatctccatatcacccaatatcgttctgtttcccactccatagagtatcacagagcccattactgccaggaaagccagaatttcaaggctcatccattttgccagaaaaatgctttctctttttcccgtagtcataagaaacccctgcagatgaccggataactccagctctatgtttccggcgcagatcacagatgccagtaccggaaaaacaactcccactgcctgcacaaaaacgaaaaactgaagctgtgcgctgattcttgtccatgccagaaaaagaacgccggcagccacaggaacaatcacatgaaggggaaacaaaaaggtgtggcgcattttataaaactctgcttttagctgtctcattatttttccacctgcctttgaaaccattttcgtgtaaaataccagagcgcagcaaaccacaaaagagagaccacaactccaaccgcagcagccggtatgctcataagctgaggcgtatatgtcatctgtcccggctgtgccagcaagccgttaggcagagtctttaaaacaggacacatcactcttggagtgaccccataaggaataaggaaaaataatttttctagagccataagaggaccggctacctggcttagtcccacacttatgatcaccataaccagcactcctgttttctgcaccagaaacagacagaagggaagctgccacaaagaagtcagccagatcagtattgccgcaagaatctgagccggtacggacggggcattaaaaaaggtcatatgaagtcctctttccataatgacagaacctgcaagaacaaaaaccgtcagaaacaaagtagcaagtccgcttaccataaccgataacagcacctttgcatcccagatccttctcatatctgccggaagcacccagattgtacggttttgctttttatgatcctttcctccaatctgagagcaggccactgccagaaatcccggcatcatcaacatgtaccaccagttatatccgtccatggcaaaataattatgagtcagctgggcagacagaaaagcgcttaccgcaggcatcaatatcatcatccaccaaagaaacgtatgacggtatttcattttttctgctttaagatatgtattcatttatctcacccctctctctactgccacaattttcataaaaagctgttccagatcctgactttcatccacaattccctcatatcccagttttccatttgctataattcctatataatctgcagtctgctgaatctcacttaaaatatggctggataccagaaccgtgatcccctgatcgggaaagctccggatcagatggcgcagttcctggatacccagaggatccagaccgtttaccggttcatccagaaccagaagctttggatgtcccagaagagcaatggcaattcccagcctctgcttcattcccagagaaaatttcccggcgggcttttttcctgtgtcagtcagatctgcaatctccagcacttccctcatacgcgcttctgtttcccccaggatcaaagcccgtaccttcaggttttcccaggcagaaagattttcgtaaacaggcggagtttcaatcaggcctccgatatccttcagatcctttctgctccagggatgcccctgaaaaataatctgcccggaatccggcctcaaaagccctgttatcatttttaacaaagtggattttcctgctccgttcggcccgagaagcccatatacacagttttccggtatagacagagaaatgttttttaaaacctgctgttttttgaaagacttttgaagatttttgatctcaatgatattctgactcatcttttccctcctgtaagtaagatatgtttaagaatcccgggaattttcggtctgacgttacccgttgttcttattgtacctacaggataaaagacaattataaggaatttataaggaaatatacttttgaagaaatttaacaacaaaaatttcgctctgctcctgacgagccataaaaaggggggctccttaattgtttcctattcctccactataatggtatcgtaatttaactcattgtgctacttaaaatacgactgcttatcgactcaaaattgcccagattacccctatataattgaaagcacttttttagaagatgagatgttttatctgtccaatatcacattgttctccaaatacactgttgaatgccatgcacaggttgtgccccagaattttattctgtaatcgggtacataatccatgaaagctttttgcgagaactttttccgcatttaactgttcgctaagctgcgaaaatacagtttccaccctacgacggaagcggaagatcagctgccgtatttcttttggccagttgttcttatgattagatggtttgagagacatcaggcagatacctttttcacgcatatcctgcaaaaggttttccccagtatagcctttatctccaaatattgtaacccgcagatggttttctgcaaggtcgcgcagtccttcccggtcatccacagatgcgggcgtaatctcaaaagcagttacataaccttctatggtaataagggcatgtactttgaacccgaaataagtttcctttttggatggacattttccataatttgcgccatcctcgcggaaggaacggcagtaacgcgcatgcccaaatttgcagactggaagagggaagctgtcaattacaaaataacggctgtcaggtattgggaaggattgagccagtttctgccggagcagttccgttacttgtaaaagagctcttctggttcggttaaatcgcgtgcggcagcatagatgcggaaaaaggtgtcgataattacgtttcacgaaagaataccatgccttttcagaatctataccaatgagttcaccacaaatgcttagcgtaattatttcagaatcagacatctttgcagtatgcacattccgcctttgggaaacgcatacagggacagaccgttgatacaaatcatcaataactgtataaacaagcaaaataaaatcttcaaaagttgctgtgagagtggtataatcatctttgaacttcaacattatgtgtgcctcctttcatagcatgtagtggtgtacagctataggataacatattttgttgaagttttttatattaactagcacaatgggttaagttatcttttcttaattggtagtaatccataattttcacgcaatcggttgaatctccgtctttgcttgtcgtccatattgaatttcttcattattctgatagtttctgaaatatcctctgtcataacagctcgccatatttcctctgaaataaatgcgatattagtatgcttatctgtaccaccttcacttactggaattttccttatacatttcatttgatgtacattcagcctattccccatgacataatcattacgaagacatacggtggtaattccctgattgtatccagaagaattttcacctgctcatccgtcaatgccttcttttcctgctttggtgttccgccttttgcggaaagcgacgcagccggattataactgatgattttgctttcttctgctgaatagaaaacacatttgatcagcatattcattttgctatacagggaagctgatttcttggagattggaaccagcagcaagcgaaggtcatcggtcgtcacttcgtccatatacatatgcttcaatcggtcgatctcatacacccgtccgtcaatccaccgaatcagacggggacggatatttccctctgcatccacatctaaattcacaggtacatatacttttctacatttctgttccgacatattctacgctcctcctctgtaaaccggcgaatgtgttgactttcttttagcaaagaactcaccagattctgccggtgctgtattaaccaatcattcctgtcggcataaccaaatccacttttcgctctgtcggcatcttgcttttttgaaaaagtaccccatttttaatcgcatctttcccgaatcggaatcgaatctgctcaatcgctgcgtccaagcgttcctggcgatccaatgatttcgcatcagtgaataggtcgtattgtatcggacaatcctcttcaaacaggttgattgcccgaactgtcaccgaacgaatcgggtgttcccactgataattctttgcaaacagagcaaatgcggttttcgccagataggtagggctttgtgtcggaattccaatccgacactgccactccttcgtgaaaagctcattgttgcggatggaaatcgctattccacccgctttcttcttatgtattcgcagcttggttccaatctcctgcaccagctccagcatgacacaccagacttcggcgttattttccaaatcctgcatggtcgttatcccgtggccaatgctttttaccggggagacataatcggaacgcataaccggcgaatcatccagcccattggcatacttcttaatcgccagtccattctttccaaggcggcacttcaagaaatcatccgaagttgcagcaagctctccaatggtatgaatcccataaccggacagaaccttctcggtcgctctgccgactccaagcaagtcagaggcaggaagacaccaaatcttctctcggaacgaatctgcttcgatgcaggtaatcgcatccggctttttcatatccgacccaagcttggcaaaaatcttattgaagctcactcctgcggaaatcgtaagtcccaattcaaacttaacggttctgcgaatctcatctgcgatttcaaatccggttcccatgcagccgcttccggtcacatccaaccagcattcgtccatcccatacggctcgatctggtcagtataacgaccgtatatctcacgggctaattttgaaaacttcatatattgctcatagtgcggctccacgatcacaagatcctgacacttctgctttgcctgccagattgcctctccagtggaaacaccaaacgcctttgctgcatagttcttcgcaagtacgataccatgccgttcctccacagaaccgcacactgccaccggcttgttcttcagttccgggttcagcatacactcgacagaggcatagaaattgttcatatcacagtgaagaatcactctttgcatcctgtattcctcctctccgttcgtgaaagcacgaacaacttttcacgaacgcattgacacacagcatttcttgtgatactataattacacgaattgtatttcgtgttttcatcgtcattatagcaagcacagtttttcgtgtcaataggtttttatgaaaaagtgttcgtgttcgtcatcaaaaaagaaagaggtatttctatggtcttcaaagaaaggttgaaagaaaaaagaacagaagccaatttaactcaggtagaacttgcagagaaggccggtgtaaccgcccgcacaattcagaattatgagcttggcagccgcaaaccatccaatatggttacgatccagaaaattgcggatgcactgaatactactactgagtacctgctgggaagcagcggcacctatgtcgtagaagctcatgaaaaaggcggcgcaaaagcagcgaaagatattgaagaactggtcagcgaagtgaccggtatgttcgctggcggcgaattaagcgaagatgccatcgaaggagcatataaagctctgaccgatgcctactggatcgccaaagagaacaataaaaaatacgccccgaaaacgaggcgtaaaaaatccgatcagtgatatttatcgtacacacttttcgctatactgtaaactggaggtggtatgatgaatgcggaacagctttcacggggcggtgagaaactggtaaaacgctgcggttccagagacccttttgaaattgccaggcagcttggtatcaatgtcatgctttgcgataattttggttccctgaagggaatgtaccgggtgattaagcgaaatcgctttattttcctgaataacagtctggatgaaaatatgctgcgcatcgtgtgcgcacatgaattaggacatgaccagcttcaccggaatatggcgaaaaccacctcgattcatgagttcatgctctacgacatgaaatccaaaccggaatatgaagccaacatcgtagcagcagaaatcctgatggacagcgatgaagtccttcgctacatctatgaatatggatacacagccgagcagatcgccagtgcgatgtccaccgacatcaatcttgttgcgctgaaggtagcacacttggcaacactcggttacaatctgcacgcactggaacataagagcaactttttgaaataacgtacctttgaggagtctggactggctcctcttttttgttgcaaattgtgcaggcggtgcttgcacaattatcagcctaacatctgcatgtgatagagcttcactttttcctcaaacggcagtcccggatcaatgccgacttcttcccacatcacaccatacagtgcgccgccatctgtatatccagcgataaaagcaaaacgaccatcgcagtcctcatacagttctgccaaccgttcccgttctttagcttcccgctccattctccgctgccgaagccgctgttcttcagcccgtttaatctggtcgagttgttcctgtgtataattgactccaagctcctgtaaatctttagcagccgtcacagcatccacatgaaagcgttcccggtaatgcttattcatctttttcggtgagccggtataggtgagcagccactgcttgccttttcggaggcgtgcttcctttcgctcagccttcgtcagtttctttttctttgccatttgcggaatctcccggattttttgctgatgattttgggttgcgctttttcggtgctgtcagctcatggctcaaagaaagcaggtctttgatggcatcatccagctccggtttgccgagctgaatactgagccatttttccttattcatgtgataggctggaaaatagccgtcttgcccacgaagagagccgatcagcagcggatcacttttcacattaaggacatcaatgatgcctgcttccggcagtcccaacttatcagcggatacttccaaaactacaccataccatttattattgtcgttgtgccgcagcacagcattccagtcatgccaggggtattccggctctgtgccgtactgctggcgtatccatgtaaataattcctgtcgtgtcactccatcgcttccccgccattttatatgtgactttgtgcaacaacctgttgcacaaagctttgcctcagataactctccacactgcattgatatcagaaatcatccagcgcagcatcaatctcttccagccgatcaatccagcccaggtcagatttcttcttggttgctgatcttttcttatcaccaccaaccacttcaaaccgtttctcttctgtcccaaacaaacctttaacctgaattctgaaatccggcttgttgttggtcagtccttgcatgagctgcacattcttgtatctgggcaggaggatttgacagatagcctgaatgtcttgctccttaatacacggtaccgccatgaactttttcgttatgtaaggctttatatctgccagtacctgcgacatagaggctttctttcgagtatcagtcgtaacaattcctccttcccactgatttttgtcattatccccttgctatatttaatcagcaatatatctaagaactttacccaggcaatctctgctgttatccgtagatacctgttgattacttcctggtgcgctaagaggcatcgctccccacataaaatgctgattataacaatctaaaagaatcctctcgtatgtacctgctgctgaagttgaactttctccagaggaaagccatctccaatttcctattgcttgataaacgaagctgtcaataacgattcctgacaaatggtagcttctaaaatagttatctcgcacatatcgtagatgcttgcaagtgtcaaaaagcagtccattactgcttatatttttgtttttcatggcatcctgttctgctttcggattagttgaacgccaattcccacccatatttgtatctggatatctgtatgagccatcccaatttttgaatgccggcagaatttcaaagaacattccatctgaaaaattgatcttcacaacctgtccatctgctcttacttcacttcttggatacggaacaagaatagcctgtctaactgcttgcagaagacgagattgaccattcccataaacagagttgaactggttgtaatatgattctgacaaggacatcaaaatatcaatatcacttgtatctatcgcagttccccttccataggagccaacatatatactattttgtctatcgcttgttatattccaaaactcacggttcattgctgatgttacagtgcaatatctttttgaaataagagaacggctgtcagctgatattacctctccatttctttgaacatacaaactcaatgtgttcatcccccatttactcattttttctcaaatgcgccggaagcatcttgtttaattcctcctgcgtaaagaattgctcttcatttgttttgagcgcagcttgggcggcagcataacttttcccatcagttaaaggtgcagcaccgtagatttccgaactttcatccaacagttcatctcttttgcgcactatctcttcaatactgatttcgtcaaaatctgtcaaaagtgacagatatttttctcttaccttccacagcttattcgcagtcttaatatgatcggttttttcagtggaaatatccttatccttcagatagcttgttagggcaaggagtgctgtcgaacatagtccaccagcccataacagtatctgtttatttgaaatgagcactcccaagaagccacctgtcgatattgctgatagcccaatctgtccccattttatccaaaaattacgcttactcaaccgatcagccatcttaaaatgacatgtataggtatatacaagtttcccatattcttcttgtatttgagaatatagttttttacggtaatccaacgaactattctccattggcgcatttcctccgtacctttagtattactctacccccaacgccttaaacaccgcatcttccgcactgctgtagaaaatcagattaaaactccctaccagctccggcggcacagtgccaaggtctgctgcactggtaatcggaagcaacactttctttgctccgctatcgaggcacacctgcaaactattggcaagctcgtccactttcagaatcgtgccgctgatgctgatttctcccagcacggcaagtgtactgaccgtaggccgtccaagagcgatgctgcatagtgcaatcaatgtaggcaatgccagctttccggtcatgccaatgccctgtaaatcctgatagttgatgatgtaatcccgcatcgtgatgctgatgctaccactgattcgatttccgtttgctttcaggaaattgaacgccgtattcgtggattccttacaatcacggtcgctgccaaggccagtgcgctcaaattttccgttgccgggcagcatctggctttcaaggcggaatacgccgatcataccggacttgccctgacttacggtatatacctgtcccggattgcagatgccatcggggatgagctttccaccgccctgctctggcacggaaacaaatttttcttcaaaggtatcaaggtcgatatagctgaagttcacatcatagaactccattccacccagctttttcagctgttccttgacacgacggcgcatttccagcgcaaatacaagaatttcttcaatctgttccttcgtgaactctccatcgggataaagcaatttcacatagccgcctacaatcttgcggacagcaatcgtatcgcgctggttcagattctttccaaggcggaaatacttatccaacgcatcaccatactgttctttccgcagttctcggataaactctgccaagtaatccgtgataaagccgtagtcgttggtgaaatgctccggacggaacttcggaatctcccagcctggaatatagcaatgcagacggtcaagaaaggctgtgtccgttcccatctccgacgggaacgggtcaaacagagaggaagtcttgagcaacacatccacgctctgattgatgtttcctacaaagaccatagatgccgatgctgccttttcctctttgccacgggcaaaggagccggaagccatatagtctttcataatctgaatgccgtctttgtccttaaacttaattccggcaacctcatcaaaggcaacgcagtcccataagcctaccaaacctacggttttgcgccccatattgtaaaacaaatttgcaacggtcgtctgaccaccggataccaggatactgttcgggctgatttctttatagatatgggacttgcctgtgctgcgcggccccaattcacagagattgaagttattctccaccaacggcagcatacgcgcaagcagcagccacttttcccgattattcagctgttccggctcatatccgcaggaacgcagcataacatccatccactcttcctgtgtgaatgccttgcgtccctctcgaacttcttcaatgtcgatatggggcatctgaatcggagtcagcttatggatgctaatgggagagatatccttctgctttttctgtttagaggaaatcggctgtccatctatatccgtgattccaaagctgctgtctccctcagattcatattccagctgcacgatacaccagataccgccacaaagcagccggtcatatttttccggataatcatccgtaatcggtacattggtgagaccaaggttagagaactctgcaaaaaagcaatcctttttgatgtccagatgcacggtcaccatatcaataatggtatggctcccgttcttgcgcagttgtgagagaattttctgagcctcatccgggcggacaaaattgtctgccagaatgtgtttcacattctgaacgccctgctcaatgattgtctcatcgtctgaactacagtactgacccagcaggaactccagcacatagaccggaacatttgctccttcttttattttctttgtcaggtctttgcggacgatccgaccgtcaaagttgctgcgcagcttccggcgcagttcttcacgggtatcgtctgccgccatatccatcatttccatacggaattcctgcctcctctatatcagaatccgaatccaaagtcatctgcaaaggcaatgtccatgatgacaggctgcctccactgctccagaccgctttcttcgtcataaaccacaaggtaatattgcttgtccttgtcgtatttcttattcttgaatgtgaaccgcatccggaagatacgcttctgtgcattttcctcgcgactgtccgctacatagctgttttcgttcgagattttctcattgtcttccgagaggaagaaaatgcggtattttgccgcttttacagtatcactgacgacatccgactggataaagtccatggacgtgatcaggttcgtaatcttatggacgatgctgaccagagcaatctctgcattctttgtttccatgtgaccacgttccatcttaaactccagcaccggtaccagcatttcctgcggtgaggaaccgccatgcacatagttagcaccgcctccggccaccttaaagacattgctgctgacaggataggacaccaccttgctgtcctcattccccagaacgcgtcccatgctcatatggtcgatgccgtcatcttccagtgccgccttggacacaataaatctgcgattaacaaatgctttttccgcgcttttcccagaaatcttgtcactttctgtcagcttatcacgcttgtaaataaagccatgatcggcagtgacgataaaatgataggtgttgccgctgacggagattcgatgaatcaagtccatgatttcctgaacggcctcctcacacgcattaaacacctcatcctcggtatttgccttgtctccacgcgcgtcaatctgattatgatatacatagataatctgacgttttgtcagcacatctcgcagctctgccactttcagatttttgatatcatcgaactgtacacagacactatccgggttatagctttgcagcacctgctgccgacctgccagattatcgcaaaggataccatctgccagcacctggaagtcatccgtcatctccagtgttttatgcggtaaaagtgctgccataccgagccttgtataagacggcaggacacttagttgtacagaaagttttgccgtacatttcgggtcatcctgcattcgggcaaacaattcctgtccgacctcgtaacgcatggcatccgaaatgatgaccacggtgcgttccttggtatagcgcaggttggcattgtaaaactcccgctgcaacggaattgccgaaaatgcggcatcctgctggattccagcattccatgctgggagcagacaagccagatattcgttcgtgtagatattttccaccagctcccgaagcggctcaaagctttccgtgctctccagctggtcgtaataatagtagaatttccgatactgctgatccatattgtaatccgcagcaagatatcggtcgatgattggctttaagccatctgcggcatggtaatccgcttccttcaccatgctgtatgcactggaaagcatctgataggttttcccagtctttctgccaaagtgcattttagctcgcttttcacagagttccggaatggtaaatccgtttacgattgcaccgatatcttccgaaacaagtctgccaatgagccactttaccagcacctgatccacggcaaggaaagtgtcgcactccaccaaatcgtccactcgcattcctgcaaatgccgaaagaacattcagccctttggcaacgtgcgccgacagagcatcgtatttgtcccggtacaggacgctgttcatcaggctatcgagaaatgcgatgatattaccggacttgtaggagacaaagctcttccatgctgccggaagctctgcctgcacatatcgaccagtataagtaacgaacaacgttaccaacagccgttccagactcggctttgtatcagtgtatccgaaatgctgctcacagagctgccagaatgcagacagcagatcgtatttttcaaactcctgcaagaaagcattgtccaccagctcgccatccgtcaacacgatgcgcacgacttcctcaaaagagcaggtacgcgccttgcagactgcactcagcagaccgacaaggatattttcttcattgaagttttcgatttccagatcatagaagcgctgggtgcgctctttgttggcgaaaaacttgatgtgcttctcaataaccggcttgtacttttcctcaataccgaggtcaaccgacaggagggaagcacggtcggcaaagaaccgtctggaatacagcattgtgtcttccagatggttgtcccttacatccggcttcggaaacggtgcataaatcagataattcgtggtcttatccacacgctccagaaaatactttgtatagaactggttatccggctggagatggtagatcttcgcattctgaagctcaaccgtctccatatcctcggcaaattctgccttgtcatcgtaccagaaaaccagtttccgggtctccccggtaaattccgcattcaggcggtctataatttgtttcaggttcaattctgccatatcaatttcctttacttgatagattccgccctttggggaatatcatacaggcagttacgccttgatccgtttattgcctgtgatgctgctaatataatcgtcaatatcctgcacgatgcaatgatcccccattgtgtgcagtgattcaaaatattttgtgatatacccatagatgccatactcttcaaaggtctttgccacatctgcaccagaaagccctttgaaatgacggtaccgctccatgcaataaatcaagaaattggattctttgctcatcgctcacgcctcctccgggtaatcataggagcctgtcagaagttcatcttgatacatggtatacagcgtcatcgggctgtaatgccacaattttgatttttcatccgaaagctcctgatacagcttggactgataaaagcgggaaatcgctttttcatcatccacattgctgttttttgtaatctgttcgatgatgggcggcacaataattgcaagcattgcgctgaactgatcttcgttcatacaagctccctcccttcaaaatgcaagtattgcagggacttctcagttgcaaacaccagctggttgaacaatttccgaatcttgagtgccgccagtgtttgttccttatccaacactccggtcatatacagggtaatagtgcggtacacatcatcatttgccacagcaccataaatcaggtcatgctgctttccccgataggttccctgacggttctcagctacaaaatccagccatgcttcatctgggctgtcaaagcgcagcaaactgcactccttgaaagccacggcttcctctacggaataaatattgagcgtagcaactcctgttttgcggcggtcggtgaccttttgagcgaagttcactgcctgatcgcggttggtggtggtataaaatccaaaaccgaagtccagataacgattttgccggataagtttcggctgttctacgataacattgcttccgtggtacaaaatcattgcaaacgcctcctgttcctcttatttcttctctttcaccatgatattcttgctgtccgccagaacctcatagaacttgccgtcctgtgcagtctggagcttacggtagttgacctttacgccgtcatcgaggtcaagctcgatacgggaaagtgccagatggctgatcttctcatcatattcccggcattccttcagctgcttggcaagtttatccttacgcttggaggctgctgctacctcgcgggcattctcgctgtgatccatcataccctgcatccggttgatctcggattcatatacgcgctgcatcttgtgcaggtagtcgatgcgcaggtttccgatggtatccggcgtgtagcggtgcaggtagaccagtgccttaaagccgttctgcttgccgctgtcaaacagccagtagatcggacgcttgccggagccagtgacagagtaagtctggcagtgatccttgaagaaatcgttcaagaaatagttgcggataatttcccggctggtgctgcccttattgccaagggcttttgcgatatagtcgaggtttgcttccagcgtatcagcaccgtaaactgctttcagccatgcacacaggcgcgatacgatatcatcgtccagatattcttcatcggtgatggggataacattatcagcatccggaatatagctctgatatttgctgctatcccactcgccgcctgcataggcaagcccttccacatccagcgagtagcgaccgaacatacagcccacggcatagcttagcaggctcttgatgtctcgctgcaagtcagccttgcgcacagtcacatctttatcttccacttccggggtcagctcttcctgtaagccgtaaatgtcgataaaaatgcggttcagctcttcctcgttggctttcagccgattaaagcggtcatcacattcagcctgccactggataaatgcctcggaaatcctcgaaacattgcggagtaatggatgcttcttataatcccaggatgtttcaaaggaatcccagtctctctgtgataattgaattgcgtcctctactttagaatcaacagattctttatagtccccctttacttcaaccggaatccgtgacatgtcgccaacctgtgtagttatagttggattaagtatttttatacatttctgggatacactagaattcaagaatcctaatacataataaatttcactgttgtttggaaatccactcgaaccttttatatcaaaaataaaaccagcttctgtaaatctcccagaaaaagacgcacttgtaatatcagaccatgttattccttgtctaaaatagtaagccgtattttgaggtctcgaacgtattttcccatgttcatccttaaagttcttaatttcttcgccatcgttctcccagtttacaacataatccctatttccataccaacgtctaaaagcaccacccttattatatggaaaccacttgtatccgcttttttgtgcctcagaacaattatgcattcccattcctattttagaaaacaaaggttcaaaccaaagttttaaatacaaatcattatttgcagttgctagcccctgcttaggcggcacaatttcagaaattgtcggataattctcaaatgcatttagcatttcctcactcgcccaaaacgcgattggatgtccttttattcgcttgaaatcatttgcacttgcttcataaaaatatccgcattccggattcttaattgcctgaacaactttgattttctgtacttccattccgcccttaaaatccgacaatttgaagcacaacgatttattgtccgatgttctgtttttcaaaacaaatgtgcagattggtacggtcgcttcctcatatgcagaatactccatttgaactaaagttgtaatgctcttattatcaatgatataatctcgaagtttctcatatgttttgataaacatccacacaaatggtgtcataaatgcactatatccaccagatgtacaaaagtcaaagttcctatacataaagacactaaataagtctccactataatctttatattgcttttgaacataatcctttaattctggattatatttattcaaatatggaggattcgtacataccgcagtgtatttttgagaaagaactcttctaagattccagatactctttttatgctcataatccatattaaaaagtgtaagttcctcgggtacaacaggttcttcctctaagtgatctacaataatcaacgaccccagtaattctccctctggataattttcggtgcaataaaggtttggcgatacatttcttgtgaaaaatcttctatcatactgacgtgccttcatcattattgcaaaatatgcaagttgagttgctcgtttgtcaatatctactccaaaaatattgtttttaacaatcaatgcagctgcatctctttgcgtgtatccgcattcttcatatacatccattaacaagtcaaatgcatacacaagaatgtgacctgaacccatacatggatcgaatattgtcaactccgttggctcaattttttcattaaccgttggcactgaaccgtctttattctttgcaaagaactccattttttcccgaagtttgctttccggctttcgttccaaccagtatcgtcctaaggaattatctaccatgtatcgaacaacccaatccgttgtaaaaagctgagttgcagcagcgacatcttcttttttcactgtacctttatcaaggatgtcaacaacttcctcatgtttttgagaaatgtagtactgatacaaccaacctacaatttcaatttgtccactctctttaacattgaaatcatcctctggtatatcgtggatcagatgataaatcacaccgtcctggttggtaacggacaagttgagcaacagttcagtgtagttctttgtcttttcaaacagagcaggcagaatctcgttcagggcattgcactgttttaggaacaggatgcggaatacctcgtccagcttgttgtcctgcttcagctggaaaatctgagtctcttcctccgcagtgaagggcaactctgcgtcaaaaggtgttgtgaccagatccggctccagcttaccgctctcggaagagagaacccggatatgggaaggcagatagtcgttgacctccatgaaacggatcgcaatcaggcggttgaaccatgtataggcaacctcctcgatcacatactgatatgcggttttatagtcggtatccttttccttctgctggatgacctctatcagcttgtcacgctgacgcacggcctcgccggaaatcgaatacggttctgcggttccgatatcgaaaaactgggtgtcaccgaagctctgcggcagcggcttggcaattccgtcctctgtaataccgatcaagcgggcatcatagctaacatctgcaatcagcttattccgcgcccagatcgcaaaattctttatggctgtcttgttcatggagccaatcctcctgtcatttatagttcaatgttgacgattgtatcttcgtccatctctttcagcaggttttcacgcaatgcggcaaggtatttatcaacatcatccttgctttccagccgccacgacgcagtcttggcaaccgtcttgatggaaacattcttcgtggtgcgcaccttatatacaggctgcggttctgtgaccttttcagccggtttcacggtctcgccgcgttttttcgcctcttcttcctgacgcttgcgctctgcctctgcctttgcctctgcttccttcgcaaggcgaatatcctctgcgttcatctcattgagcaggcgcagcttcagtgcttccgccttatctgcatagctacgcagagtggagacattgttgcagtgctccgcaccgtccataatctccttaaacagttccaaataacggttgaacttcgtatccttatagggcttggtgttcagcacttcaaagacacggttccgatcctgattgatggaatccttgaccggctctgcctgctcttccagaatgcgcatatagcagttcataaacttctcgcgcagctccggcagcttcggaatctccttgtagggcttcgccatccggacgatggtacgcatcttagccaccacgtcttccagttctgcatccacgatgtaggtcttgctgtcctcgtaaatattcagcatatccagcgcacgagtgaagatggtcagctgctcactgccaaagaaatcacggataggctcatagtcttcgccaaaatccatcagatcatcctgctcgtcaaatacggtcttaaagaattccagcggtgcctgaatctgcaccagtgcggaaagccgcttcttacccttttccagaagttctttcccaggataggcgtaattctcatatttgggttccagacgctcaatctcggtgatccgattctcgcagtagtgctggaagttcttcatgatggtatcttcgtcatcggcaggcggtgccaccttaaacagctctttcatcacggtgcggacggcctttttctggttttccggcacacggacgcgcacttccgtcagcagcttatccacaaactgcttcttcgtgatgtagccgatgatttcttcttcggaacggttgtttagattgacgctctcaccgttgaccgtaaaggacagatctccacgcataaagagacgtgccaccagccaatggatgtcatcttccacaaagccatagggtgctttcataaagcgatccttaatggttttcatagaagttttcatgtgcatccgggaattgcccgccacgaattgcagcacatcatccagcgcgtgaacattggattctccggtatctcccagtgccagtgacagctgattgctggtcttgaacatcttccggatgtctgcttcgcccatcgctgcgtcaatgtaggacagcttgtggtaaaccgtctgcaccaatcttccgattgcctcgttgatgcggctggtcacttcctttccggaagtgtgcagcacatcgccattgacatagatagtagcctctttcagagcttccgtcaggtaaagcttggcgttaccgttgcgttcccgcatctccacgcgctttgcttccttaatggtctcatacttggcaagctgcacagaagtattcttgcgcaggaaccgctcaattttcaagtatgcccgcatttccgtcaggaacgcatcatcgttcggcagaaccacaaggacttccttgccctggccagagagcaggcgcagcgtaccatcatcggtgccgccctcataccacggggtcagtacacggagaccgatatcgtaattctggtttgccttataggggcggtcatccactgtctgattgaaggagaacgcataccgtccaccaaagctggggtactgatacttcttgctggagaaaatgtcctcatagatcatctcggcaatcttcgtgatgacctccggcatctccacattttctttttcgatttcgttgttgatctcctgttcctcatcggtcagaaatacatagatggagccgttcttctgaatcagcatctggcgcatcagcactttcagtgcatcttccacctgtgctttcagagagatacgatcatcgtcaatgctggtaatcatcaggctgacgatgttgtccacgttggcttcgatttccagaacatatttaatcaggaaaagagtcttcagcacattgatggcaaagacatctttttccttcttttccgggttgatatagctgttgtcataagcgcggatgatcacactgctgtggctgtggtcgaggaagttctccaatgcatcatagaaccgatagaacggcacgattgcccccatctcatcgtccatcagctgcatggcagactctttgaacagagccagcatggaacgttcaccttcggacaggtgcttgccggatgcaccatgggtacggatgctggtcagcacgctggcaagcaaattaaactggtatggaacaaaaggataaacctcagcaaaatcttctgcgttggcgtacagttttttctccacaccatcgttgaagacaatcagatttttgatgatggttgctttctggtcatagagcagacgcaggctctgggctgcggtctctgtcttatccagaatacgctttttgataacagcgtccacattggcagaggacagagaaaggcgtgtatcgaaacgtccctgaatcttggagaagtcgttacccttcaccttggtaatggagtcgatatcctgctggctcgttacgattacccaagccttacccatgcactccttgcccagttcttccgtcactgtctgaaggttcagcatcagcttggaatcatcgccaatgtactgaccgatctcatccacaaggaaaacaacatggtggttattgccttttttatcaatataggactttacacgcttggcaaaatcttcaatgctgatctggtagctctcggttgctttctcgcaccagttacgggcagctgattcgctcatgaaatccatgtcagaaagaacatcgacaacggaatcctgaatgaaatcgaagtcctgacgagagctttcccacggatcgccatactcttcttcaaacttttccttaaactcttcaaaacgaccttcctcggaaagcctgcgctccaggtcagcaaggtgcggcatggaaccgcagaagccctgcatctcgttgaaaactttcaggaatacgttcacaatggcatccttattttctttgccattcgaatcgcttttggaatcaatgttgaaaagaatcacatctgatggggtgtttgctgccagctgcatatctgccagcaccatctgattggtaatcttctgatcttcgataaagtagtcgatggcatgtttgtctccgacctgtttattctgaagcagataggacagaattttcaggaaatgagatttaccacttccaaagaagccggaaatccagacacccatttttggtgtggttccctgaataccttttttatatgctgcaaagaaatccgcaaaatgacgctgaagctcacgggtcacaacatactcttccagctcctgcgccacatttgtctcttcaccctgaccgacaatgataacgccctgtatctcacggtcaattttctttcggaacatgtccttgatctgcataacagtttcctccatccattactttaccagtcggaatgcccggtaatagttatcgtctttaatctcattgaacaggatcagctcctgttcattataggttcccggaaagaacatcacgaccgggcagcgcacaaacgcctggtgcaagttgttaagcaccttgtgggagcgcaaaatcggatagcacttgccgataccggtcaggaacacgactgcattctccggcgtatgttctttgatatattgcacgatcaggctgtcatcgtcatttaccttcatggagttggtcactgccttgacgatacgctcgattcctcgctttttttcaaagtcatagcacttttccatgaagtttttcttttccaaaaagtcaatgatgatatcatacaggtcaaagaccacaagctcaaaatcatcatcgccccggtcgttcttatttttcagatactctacacgctcccgaacttccagttccttttccggtggataatcaaacacccaatagttgacctcatttgcgcggcctgttccttttcggaaagacggcttatggattgcaagctccatctcatccagtctttggcttaaatccatttcatcttacccccgtcagtgtttttaccatgatgccaaggtcatggtcataaagccaatgctcaaatgcaatatcaagaattggcctcagtatttttcttgtgctgtttgcccggttgctttctaaaagcccagcttcataaagctgcgttttatagcaggagccgaggcggtgcagcgtatagtcttgaagagaagccactttctcactctgttcctgcttatttttgaagaatatccggatatctgcatccgtcagctcgtcggaaccaagaatcattttttcccgcactacttcatacacaaaatcaaagaacagcgtgtcatgcaaaagagccgcagtcagcacaaataatttttgtgtagcaagatcactgctcaaaaagattgggtaaaagctttcatctaatgtcttgatacgggctgttacggtagaataaatctgctgcgctcgtagtcttgtcggtgcgccataaatgtttgtctcttcattcaactttttaatgtctgcaaagctcttaccctcactcaaaagctgcacggttttccgaaattccatgaaccagaacgaaaatttcacggctccggcactatacggttttctttccatcttcgttctctccatttccggattttgttttaatgtatctgccgcttttgattctggcatccttcggcttttcggcgttaataggaatgacccactgatggcctaaacgctcggcaccatcaattcgcccttctgtgcataatgtctgtactctccttgtgcagatgccccatttttcagaagcctgcttaatcgtcatgaaatccatacggaacctctttttcgatgtctaaagtcactcgcagcaagttaaaatttctcatttatattctactccaagaaacgaacaaaatcaatcgaaagttcttccaaattttgaacgatttttttagaatccactcttctgcaagcagggctttcgtgacacgaaagcgattttctgcttgttggggaaactccccaatccccatagaacgctgcctgcggcatcgagctgtgcatccgttccggatgctttaacggcagttcctgccaaagaaaaaagcccggtgcagcatgagcattacgcccacactgcaccggacaatccatcatcgactgctttgtctattttcttcttcctgccgaacttcctgctcatgcagctgctcttttttctggtcgtcctctttcaggatttcctgcacaatcttctgtgccacaagccaatcctgcatttctgattttgtcttgcgatgctctgcatccagcttacaaaaccggagcagtcaaaactggtactcggcgagctgccgccccaaacatagggataaccgagatatttctcagcttctgtaatcatcttccggaatttttcatccgtcagagcttcgcccggaatgtcgtaatcctgatattctccgctggaacctgcgccatccggcattgcaaaggcaatgcctgcaaacagatcatcccgattgccccggcactccaatgtgacttcgtagcgttgcagctggtcatctgtaaggccggaatttctggcaacatagtccacaccccgattgagcagcgttacattgaggattttatactcatactgtaccgtcacctgataggtgtaggtgtgtccggttccggtgatcggattgtagcgatagcccacacgggtttctttcctcgtccggatttccaccttttcctccaacttcagctcatactgtgcttcaaaaatactctggagccgcgtctgtacctggcttctcgtatgagatatatttccaccattcggccatacacgataacaaagataatagccgacaatgccagcatcgtgacctgaaccacaaatgtctgcaaatacagtcccagcagcggtcccaagtccatgccttaccgtatacggcttttccgtacacggtgattccgaacacggctttttccttggcatctcataaatcacatactccgctctgcccatccgaccgttgctctcacgctgctggttcctttccagatacccaagacgctccagctccttcaaagccgtaagcactccatctacgccatccggcgtaatcgaagataacccccgtaccgaatagttccatgtgtctggcaagctgagcagcatggagagaagtccttttcctttcaggctgagaccctgatcccgcaggtggtaattgcacatcgttgtgtaattgctgtttttctcaaccctgaataccggcatggtgctcaccatcctttttcgcaggctccgcttttttcttcggacatttgcgcggacgatcttcgctgtcctcccggcgatggtatttgccggtatcctgcatcatgcgttcaaacgcctgaaggcgtccctctgtaaaaagcgtcattcgatcacaccccatttcttaaacaacttgaagagatgattctttcccttgcaggtcactctcgtctgctgcaccagttttccgcttctgccgtagcaatcccggacaataaaatagccccttgcagatttgtctgcaaaaggcatcagccagccactcggactgcggtacagatagcgatgatccagtaagagagccactgccgtcttctccgggattccgatttccttacagaaattccggatgcaggtgcaatcctccgaattcacaaaggtatcgaagtagtctgccttgggctgcgccgcatccagctgtttgcggataccctcaagctgctccctctcggctacaagttcctgcgccagggtgtagatgacttccggatgctgaatcacctgatccaaaacggaatcgctcatatacacaccatgcttgcggatggaagggagaacttcatcaaacacccagtgttcaaatcgttctgccgatggcagcttgctgtgaacgatcagccggtaaacatcgccttctgtgataaaggcgatttcaacgacctgctctccagcatccccatactgattcaccttctgaacgaccccctcgcgtttcgttagggggcctctgcaatggcgtttcactgcggcgtagggattcacataccccaacgctttcgccacatcgcttgcacagaagaaggtcttgcctgcctcttgtaacaaccggatcgaaccaaactcctggttctcaaacacctccatcatctgcctcgactgtccgccatgactgcccacatcggtatcatgggtcttctgattgaaatccgtcatacctgttacctcctactcaaatttgtctcgccggatttcaggcgaaaaaaaatagagcctcgacccattctcgttttcaaagaatgagccaaggctctatgtaaatcagtcaagtatgtgttcgtccgtcgatggcaaaattggacttcatttgctcctattgtccaccagtaatttaacccataagaggtcaaaatgggcttgtccaccgtaagcgcttaatttttaggtatgatagaaaaatccccgactacttttcagtagtcggagcaccttgacaattcacatatgattgatttgatccgtttgcacgacgttcgatttcagctttgacggtttccttccatggagccagaagttctaattcatcatcactcattctatcatcaggtagtttttccagcagataagtaagatagtgatagacgtttacgccattggcttttgccatctctaccattgtgtacacgatagcgctggcctgggctccgtttggtgtgtcacagaacagccagtttttacggcctactgtaaacggacggatcgcattttcactgagattattagaaaaactgcagcgcccgtcttcgagataggtagtcagataggagcggcggttctgaatgtaggtgacagctttatccattctgcttccacgggtagggttctgctgatcaagccacgacaaaaagccttctactaccggcttttctttttcaaggcgagccttttttatagcatcgaaggaagaatactttgatctgatcacatcttccagatggaagagctggttaatgtacagcattccctgtacagatggctgggtataatccagtgcttttcccttagggatggcatctgtcagatatcttctgatgtgtgcccagcaggctgtgcgtttggcatccggtactttattgtatccgctatagccatcacacatcagataacccttgaagccgtgaagaaaatctacggcattgtccccggcccgggtctccgagtatttatagaggataataggtggtcctccgtcttcaccgctgcggaacagccacatatatgacttggtttgcgcgcggcgttccggttcatgcagaacctgaagtggcgtttcatctgccatcgcgaatccacgttccagaagtttcctgtggaagtattcgtacataggaagaaaaaatgcttcagaattccggatcacccagtttgccatagtagctctggtgatctccacgccatactgtttccagtccttttcctgacggtagtatggaagaccattacaaaacttctggtacattacccaggcaaccgttccggcagaagccattccataaagcatatgagatctgccatcttttccttttttgataaccggaatatcctgaagcctgcactgcgggcactcatagctcttactgtagtattcatatactttcagttttgccggtacaaaaaccagttcccggcggacaaactcttccccgatttctttcagcggggtaccacagacagggcagagtttctcttcctcagaaagttccagatacttttttttaacaggaactcccttaaaacgctccgcatctgtagctcttgcttttcgcttttttgctgttttttccggaagaattgcttcaagatcctctgcttctgcagttttcggatcctgttccagttccgcttcattgaaaaagtttaactggcctggaatatcgagggtccttttttcgctggaggtgccaaacagttttttacggagaaggtctatctcttctttcagattatcccgctcctgggtgagagcctcttcccgtttattggcagcatcgacagttgcctgaagtgtttttatcatctttttgagatcgtttatcatgtccttcagctcacggagctggatatctttggaactgtctgccactgctttttcctcctgtttctgatgtttctattataccagaatacagtggtttttcccagcaaaacagcggatttaccaggacttgaaagtgccgaaaatacagcaaaaaacaagagttttatgtgcatcttttttacgttgccttgatcgctttgggctgctcaatatcaatgccagacattagccagtcgaactcccgccatgtaagattccggacttcagatttattcctgggccaccggtaagatccctgggcggtcagtcttttgtagatcataacgatcccgtcaggttcttttaaaatggctttgatacggtcgcatctacgaccgcagaaaagaaaaagtgcatgatcgatctccatcgaaaactgttcctggatgatcgcacacaatccatcaatggacttgcgcatatctgttctgccacagacgatatagattgcatcaacactcgagatatccgctaacataacgactccttcagcgtatccataagcatcttcaaaagtaccggtttgatctcattactcattcgtataagcaatccgtctgcttcgatttcaatcgtatgtgaattgtcaaggtgcataggactgttcccattatctgggatcagtcctgccggagaagactccggttctatagcaatctggactacatcctgtttatgggatgtaaggtcaagagtgctggcttttccaactggatccgatatctggcaggctttttttcggagacgggtaactgcattgtaaaaacagctgggagatatcccatgctcattacaccatgcagcatctgtcaggccactttgtctgcattcggttaccagttccatccattcgtccagggaacgccctgaagcacgtttcttactcataatgaaacctccaaatgtggtaaatttctatctcctatcaagcggagtgtagtaaaaatctatttactatcattatgagttcaaaaacgtagacagtaaagctacccaagatttaagcgcttactgtccaccagtaatttgaccactataaacccataaatttccgttcaaattccatcaaaaccgaacagtccagacagaattttgggcatagaaaaagcccggaaaatggcgtatttccgggcttttttagcatttttaagcagtcgattatctcttgctgaactgaaattaacgtttaggtaactgagaacgcttgattttactggattcttggaatgtggtgttgcaaacacgttacaaacacagggcttctcattacgcctcaccacacctctaaactatcaaagagggagatgactcaaaataacaaatgtgcatcttcctctttttttctcgcaatattattcccactcgacaatcactaatcaattttgtttagagattatttgttgccgtgttcctatttcttttgattatttgatttatccatattatcctgcctatacgggctaatgttatcattttgttatcggcattgataacacacgctctgtaactgtggataatagcaatatgttccaactcaaattataagcagttttgcttagaatatctagaaagaatactattcatcaatgaacaacgttatataagatgctttcgataatcaatcgtgtcaattccataaacctgtgtatctacacattcacataaatcagggtcaaacaatgctaaattatacccttcactatgcattacacttttatactctataccagcatactctgcaacatcatcatgtataatacttttcacaaaatctgtaatatattgagttggaacataatccaaagcactgtcgctccttctcataattttactcatttcatcatttatcttattcaaatgctctttattaattgcatattccaaacaattcaatccttctataaatggactgatttgattaattcgttttaaatcaacaacaataatgtcctttttcaatttaaatttccctaccgtcacaaaatcatatgcaccagctcttgcctcatatattgtagtctcagcagtatcacccaaatacaaacacctaattccttttgcattagctctaccatctgtagtcttatcaattggcggtgcccccatttcctcgataggaattccgtcttccgttgaaattctacatctataaaataattctccttctttatatggcttacgaatatacgagcaaaaccgctctaataaattcaaatctacataatgagtatgaaaacgattctttatttttaatgcctctacaaaatcatcccaagaatttgttgttaaaagtgaatgactcgataaatactcttgatcatataattcctgaacaccaactggctgatcaaacaactctgcattatattcatacttttctttacatactgcagtaattatgtaatatacctctgactcactttttttattaaatatattccaattattaattaactcactcttcaacagacgagtatctgatttcggatatgattcagacaacattgaaaccggtgtatatatacttaacaattcatcaaacatcatacccaaatcttcatacttatctgtatcatatatatgcacctttttacttttacataatggacaatccccaatctctgctttattccgaataacagagataacttctgtatcgcaaaagcatttttcgcaaattatcataagctactccttatccaaatatcttcctatcagctccaaatgatgcataatagatagttttttcactgttcctaaccccggataagcttctcgatgatataaatcttcaaactctttcattgccactgtatcaagttgtttttcttcattccattctactagttttgacaacgcttcttgaaactttccagcagggtcacttatatcatcatttgaatcagacacaaaatgttttacacgcaaactatcatctgtattaaaatatacaatatgaattgcgactgcatacggtgcaaatccagtttcattatattccttaccaactatagaataatcggaaaaacctacatatccatcttccaaataatataaatgatcttccgaaaaaggttcgtcatcaacctcaacataatcattatttctatcttgtttattgaacttatctgccaaaagcaccctattttttcttattttccttctaaatccactttcatccggtattaaattatacttaacatccttggctgcaaagtatgcttcatatatagaaattgcgtctttatcatcacagattgtccccatattatctgcatatctttcgataaatttttctggcttcaaatttgcttttagtaaattcataaaaaggagattatggttctcctttaaacttgcagagaaattttcctttaacttctgatttttttcttctcttgcatcacttttaaaactccctaccttaggattagtaattatagcaagctgtttattatgctttccatatgtttctatagttttaacaagcgtagcagacaattttacaggttcaataataggcataattctaccgctcaaaacatctttttctactaattcacgcaacgcaatcaattcaaattgccttcctcttaaataaggaaaatacatactacacacctccatattgatggtctaaaaatatttccagtttccgataatcatcatatgacaactccataaaatatgccaagaactttaactcatatggaattttaacaaactcctctttttctagtctcattctcttttttaatattctcaaaacaagtaaatatgactcttctatcggtatttgcaaaaacatttttttacaagtagaataatatttaaactgcgtaacttttggtaaatagccatactgctgagtaattatgtcttcatattcactttttcttaataatttaaaaataatttccttctccaaatcatctgtgtagctttgtggttttcgaattgtacctagttttccattttttctcaatatgtaaatacccacaggtttatcaatattatccagcactttatataatcgttgtaaatttttctcataagtaactaccgctacatgatcaaatgccttataataatcatcaatctgagaacctaatctctctaaattatccaattctgtctttatttcatatacaacagcctttccatttattaacacaaaatctgctttagatttcccaatcactacttctgttaaagcaactgtcgtattaacactatgtacacctaaaagcaatttattcaacaaagtatttttataaaaatattcatttctataattatcttttaattcgcaatagatttcacttataagttcccgattattcttttggacataatcacttgtatagcgctttactactgacgaatatacattatcctctttcccacttataaaatggcgaagcatattacgagtaaatattctattcaaattacttattttatttgtttccataaacttcgcctccttccacttcccagcttttttaacatcattttttattatcaaaatcagtatccgaaacattcctattacaaataataactatctattctatacaaaattatatgcgattttacttagagattcaatagacattgctacttttacaaactatcctaatttttctaaagttccttattgctaatcaaactctacaatttcattattaaaataaaaacttgcaattaactggttcattttggcattaaaaatattatcaaactctgtctcaacaacttggattaattctaaaactgaaactaaatattttgcaatacagtgctcatttacaaaaatcaaatcaccttctaacatatctgatacacgtgaaaaagtttttccattcttaaatttttcatctaccatgccattattatgtacaataacatttctcaaattaactaaatcaagtagattatctctactttcagacgaaatatactctttgagattaatatttaatcctttcttataatggtcatttgccttatcaaaattcataaaatcattattcgtgcttttttgaatgagcaaatctatatatcttatcccatagcttctatactttatatgagctatatccatatagaaatctcttagtgccttttcaagaatactagctaattgaactaattccatttgcattatatcataagtaataattcgcatatcatctttattatatttatttgaaagtgtactatatccagctctatgcacttcctgcatccttatcaatgagcttaactggaaaaatatatttattgaagtagatttctttccgcacttactacaatattgtaattgctttttaatttttgagaaagattccgttcttatatctattctaatttccccacaatatggacaacaaatctgtataagtttaattttccttcttcttgcatttagtataaatttgtctatagaaagttttttcacatgatacttattgcaatactccttataaacctcataatacttcataagcataaaagccccttgtttttctccaaaccccctcaaaaaattttcatctaccaaatgatagatatctgtgcttttttctaaatatttaccaacaatactttttgacatattttctcctcataggtaatttatctttcaccatccatcttctctacaaactgagatatatttagtaactaatttttacatatttgttgtatttatctgcataacacaaacaatagtacacaataatgtagcaatattgataaaaatattactaatctttttattcttacaaagagagccaatgctgataatgataaatataacacttaaaatcagaaaaaacaaatgccataaattcatatgatacatagaagtaccttttataaatcttgacaccaaattactaatatcccctaataaaataagcacagttaaagttatatccgcaatatacgatataaaagcaaatcgtttaaactttttgtaagaccatatagcccccgacaaaatcaacaataggacaggaaatgaataaataaaaattaaaacccacattaactttgttgatgatcctattgcgtccatttatactcccctttcctctaaatataaaatatttttactctattatttttagagcaatctcttgggcaagattactcgaaacccgttctttttgcaaactatcttcaagatatacagcaaaatattctctttgtgatcccttttcaataaaacctataaaccatgtttctccatttgttccagaacctgttttcccatatacttttttctcttgctcatcttcaattaacataactttctttaatatttcaacattctgactatcatagaaacttttaccttcaaaaatttttgataaaacctgtacctgttcatatggcgatatttttaaagatgaacctaaccaaaatccgtttaattctttgtatggatttatattacttccttcccatgcagaaacatcgcaattaccatactccaactcacttagttctttttttacttcttgttcccccacactatttataatctgatgaaaataccatatacaagatgtctgaaacgcttttttcaaagtcaaattctcgttccattccgtatttggatattgagttccattatagttcatagtggaagtttcatctttaataatatcgttgtgtaatcctactaatgtagaaataattttaaaagttgaatatggggatacttcttgttttgccatatctttattgtacagagaatacttgttttctgacggactatataaaactgcacagcccgtaacaccattaaagttgctacttaaatcaagtatttcttcttcattgctctcgctcactttttcttccgttttatcatctgtttttgatttttctaattgatttgtttctatcaattccactttttcttctctagatgaacacccagataacattataaaacatattactgaaatacaagtaatcttaaataatcttgacatactttcaatgctccttacaacttgcaatttatccctttatcataattatatacatcagccacctacattgtaaagcgaaaagcaagccattttagacttgcttcccgccactctcattccttattgataaatcatttctttatccacaatctcccttgcacacgattgtatattgttcattctcgctacccattccatctgattttctgcctttaactgttccgtgatcccatgtgcctgtttcatctgctctacaaccctttcaaagcgttcctgtgcctgttcttctatatcagccaaataatcattcaaccttctacttgtaagcagattcagatatacactcctgcaatattctttcagatagcgtaaatgtctttgtcctcatacgccgataaacctctgttcttcctccggcaagataagacaggggataagataatccccatgtctgatataagtgccgcccatttcttcaaatatcgttttcttcataatcgtttccacctttcttatcgttctctatccatagattttttcttaactgaccgtttcggctgctgtctgccttcctgctgatagcggtgcagcttttccagtacactcgcttttttcggctgttctaacggtttctctttcttctgttccgtctgatttttccatgcccttagttcttcgttgtattctataatcaattcttctgccttgttataaaccttctgaaaggcttgcacattgggatagccttcccgctttactatctgttccaaactcttgtgcagacgtttctccaaatcctctaacagttcaattttcccctccaaagattttcgctctttgcctttaaatagtcctcgtaactctgacagttgctttttcaaagaagaaatatcctgctgtgtgcgttttatctctattgactgtctctgcaattcatacatgagcttctgcatatctttccattcctgcaaatcaatctttggcacaggtttcggcggtagtttaaatttgaaaattacctcctgcaaaaagtctttcgcacctcggataatctgacggaacatatccggcagccaaccgtgtgtcctgatagattgcagcgttttgtctgtgatttttttctgcttgatcttcaaaatatcttcttcgggaacacccacgactaatgccacatcaactgtccgattccattcctgccttgccgcattgtccgcctttatctcctctgctttcggattgttctttccaattttcttcgttgccaaatatacgccgccctgttggaatacggatagtttttctgattcctcttttacatatcggttgatcgtatcggtaaatagttccttgacttctttagtaaaggctttgttcttaaaccattcatccttttttgtgaagatatggctttcataaatttcccctttggggataatgctgcacccggctcggatatttccctgctcgtctaaaacctctttctttgtgcgtctatgctttccctgctcatcataaaacatatttcgggtagcaatctttacttcgggttgttccaacattttccgttcactgaataccagatgaatatgataattcgtctttgccttgttgtgatgaagggctgcactacactccacaccataccttttatgaaaactctccgtaaaaagccttaccacatcatctgccctgtactgaacaaaactttcaggaagtgcaatgataaactcacgcccttcaatacatttccctgctgaaccactcgccttaaaatccaattgattttctcttacaagatttttccaaaactccggtgttactccttctgtctgataggtcgcatagagatattcctgccgtttcggattggagatataatcaatccttcctgccacatcggacagcttgctttgtctgataaatgaatgtctgcctataagcatcctccttcctcggctctcgccgactttattgtgagtaggtgcataggcacctgtttacgaacctatccgcctgtcggcggtttgctcccggcagggcgaaatacactgagcataaaactttagttttgtgcgatgggtgtatttcgctctcaatcgccgagggctgtttttgtattacataatctgattattactcagacttgcgattccatttatgggcgtatccgcccttttgatctgcccgtatccgggctggtttaacatctccaacactcccttctgctaaaaaataaaataaattcaagaattacacgtataagcgtataaacgtattttccatacttttcagaaacctgtaatcccttgatttccctgatgatatacgcatatacgcttctttggaaaattcttttttatctgcttttcatccgtatcaacgatagttgtctatgcgtatctgcgtatggattccttgaaagcctctggcatttttcccattgtctgagggaatattcgtagaataatgaatgtgatacttcttttcattttcttttaagtaccccgaaaaactttttgcactcataggtttttccgtattgtcttcacaccagcggcagtatgcctgatataaaattttagaagttgccgttgtattttcttccagtcggatatacccggatgactgcataaaagcgataatgttattcccagattccatagcttcgtgtagatttttctttgcacgttcgctgatggtaaaacggtatttatttttcagtaatcgtttcaatccctccagacaccaaaggaaaatatcgtctgcttctctttgcagtttctcaatcagatagggatcatctactctgtccggcggcacatctttgaccgtaaggataatctgtctgcggtaaaatccataggaacggtcatgtaaagcactcagacttccgtttccaaagcaaagaaacctgacatataaattcccctgtacgctctgctttgacttcctttccaaatccatcttatcctccaaagtgactatggttttaatgtagttggtgtctttcaatgcttccagtttcatatcatcatccaccatcaaaagtcggtattccaaatctgcccttgcaaaacggttatgctctaccttttgaatattgcttacattcatattcgttccgagaatttttctcatgaccagaccaatacgggattttccctccccgccttttcctaagataatcaataacttctgtgccttgttggatggaattaaacaatatcccatatattcctgcaaggtaggaatatcatcttcctccagcagttctgaaaggaatttcatccaccgttccggctttgtttctttcatttcataatttacaggcaagcggttcaggcaaaactccttattttctgtaaaatctccattcaaaaaataagttccattattcacatggatgcgatccatttgcaccggaagttcctctgaataggcttccagttttagaacctccaaaagctgttttactttcttggaaattcctttcgtaagaaccggttttaccattctataaatttctttttctacttcactgtctggcaacattccatcataactgaaaaagataccgttgatacacttcaatggcattctttgcaggaaattttcacaaaatgctacttcatcaatctgcccatcctcaaaccattcctgagagtacgtcttagagttcatttccctctgatccaatgcttcttccagtctgttccttgttgtttcgtctatattcttccattcgttcttcaattcttttcacatccttcccactatccagtaaaaattcaattctgtcctgtaactctccaaacaccagtaaatccagatcgtaatttatcttttctatctgctgacaggcttctataaattctgctttccattcttcctctggtgtttttggtgcatatcttattttccattcttccaataaatgaagataatccgataaaatgcggatactttcctgttcccattcttcaaatttcttttcggtctggtacaatgttcttttcggtttttctttcttcttactggtattccttttctttgcgttatctgtaaaaataggtatctgaaaatcttctgccagtttctttgctgcttccaatggtgcaaaatgaaagaaatctgccacaaacgtgattacatcccctttcgcaccacaggcaaaacaacaaaatcctttgtctactttcatactgggatgcctatcatcatgaaaggggcaacagaccatcccgtttttattgactttcaccccatactgctcggctgcctgccttgcagttacgttttcttttactacttgaaaaatattcaattcgactcctttaaaattttcgttgtattctctcagagcctttgatatactgaatttgcgagatagagttatcaaaagctctgagaagttgtccttgtgttacgcaagggctttttcttttccctgcttttttgcctctccattgaaatatccagtttcctcccatactttacgatcagaacagtaataactgaattcattggaatcgcccatcttcattgccactccaaatttcaaaattccctgctgtattccgatacgaacgtaatgagcatcttttccgattgcttttgcgatttccgtaattggcacatttcttcccgtaaatggcggcaattctacatataatcttttatccattttccacatcctcctttacaatctgactaagttcttgatctaaagctgtagcaattttatatgccacctgtggtgtacagctctttcctgatataatgcaggaaatcgtctgccttgacactccacttaactcagccaatttcttaattgttaatcctctttctcccatcaaaatctgcattttaaatacgtttatcttcattttgtttctcctttcttttttaatatgcacttttaatgcgtattttttattatatgcacttattctgcacatgtcaatactattccatataaatatgtacttgtaattcgtatttttctatgatatgataagcgtgaggtgaataatgatgagtaatgagaagttacataacaatcaaatcggacttagaatccgtactgctcgaaaagaaaaaggtatcaaccaaacagagcttgcaaatttgttggggaaatcgcttcgtacaatccaaaaatatgaaagcggagaaatcgaagtttccattgctatgctcaatgaaatcgcaaaagttttaagctgcgaatccacatatcttatagggtatgatgctgagagaaaacctttagaaaatctttctgatattatgaatttcttatttcagttagataagataaaggaacttggcttcaatatcgaagtcaaacgcccgccacattatgatggatgggaatgtgctattacttttaatggcaaagatgtttctacggagttaaatcaggatctctgtctattcttggaagaatttgaggataaaagaaacgaagtcaaggactatcagacaagtcttgaatcttatcagaagtggcaggataaaacacttgcatattacgcaaatgcaaaactgactgaaaaagaaacagaagagatctcaaacgaagaacgaatacgaagatttcaaaaaatcatgaacgaacggtacggtaaaaaagagtcctaatttttaaggaggatttttagaatatgaaattaccgaacggctacggaagtgtagtaaaactatctggaaaaagaagaaaaccttggatggttcgtaaaaccacaggctatcgcattgatccagtcaaagaaaagaaagtaaatgaatatattattattggatatgccgccacaaaaacagagggattgcaaatgttggctgattataatcggaatccttatgataccaaggcagccaaaatgacttttgatgaagtgtatgaggaatggtctaagaaaaaatttcctacggtatccgaaagcaatatcaaaggatataaggcatcttacaaaacatgtggcattctttacaaccgagtttttaaagatttaaaactggcagacttacaacaggttattgacacctgcggaaagaattttcccacattgaagaaaatcaaaatcctgttcaaccagttatatgaatttgcattgaagaatgacatctgcaacaaagattattctacttttgttgaaatcgcccagtacaaagaccgcaatccaaacaagcatacacgtacaaaattcacgaaagaagaagttgcaaaagtctggacaatgaaagaggacaaatactatcagatcatcctcatgctgctctataatggcacacgtatctccgaatttcttgatttgaagaaagaaaatgtgcatttggaagaacagtattttgatgtaattgacagcaaaacagaaaacggaatccaaaaagttccgattgctgataagctcctgccttactataaagactggtataattcttgtcctgattgcgaatatcttcttcatacagaggatggcaaaagatttctttatcgcaattactatgacagctattggactcctcttgtggaacagattggaattgaccgtacaccacattgtacccggcatacatgtatttccatgttatcggaagctggtgttcaggatacaacaatcaagaaaattgtggggcactccggtgctatgactttgacagaaaaagtttatactcacttagatatgcaggttcttgtagacgcaatcaacaaaaccttagaaaatgaggacagcgtaactgccgatacaaaatctgcataacaaaaaggacactctccagtgtctatcaccgaaaagtgtcctatattttttagatatttttgttgcaaacgtgttgcaaatgcgttgcgaactgagtaaattccaccgcttttcaccacatctgacaactccccaaacccttttaaaacaaggatttgaacgtaaatccgagttccgaagattatctcttgctgaactgaggtgctctacgagctgccttgagaccgtattttttacgctctttcatacgtggatcacgtgtaaggaatccagcagctttcagaactggtctgtactcagcgtctgcctgaagcagtgctcttgcaacgccgtgtctgatagcaccagcctgtcctgtgtatccgccgccttttacattaacgagaacatcaaatttgccctctgtctctgtagcagccagtggctgacgaacgataactttcagtgtttcaagaccgaaatactcgtcgatatctcttttattgattgtgattttgcctgtaccaggtgtaaggtaaactcttgcgattgatttttttcttcttcctgttccgtagaattttgcgctagccaatgtctcttacctcctcattaaaatgttaagacttccggtttctgagcctcatgtttgtgctccggtccggcataaacgaaaagtttcttgtacatggttcttcccagaggtccctttggaagcatacctttaacagccagctcaataaccttttccggtttcttagccatcatttcttttaatgtggtctctttcattccgcccacataatcagagtggtgatagtagatcttctgatccattttctttcctgttactttgatcttgtcagcgtttacgatgatcacataatcacctgtatctacatgcggtgtaaactgaggtttgtttttacctcttaatacacttgcaacaccagatgccagacggcccagtgtacagccttctgcatcaactacataccattttctctcgattttatctggattagccatataagtctgcatggttttacctcctgttaattatcaacgatttaatttgtctgaccgcggtatcccgcgataataaataattcctggtgatcagtgcaaaataatcgcggaaatgtccgaaaccgctgataaaacgcctttgccggggctttggctcaggagttatcgcactatgtcacattgagtaattgtactatacactttatgttctgtcaacatttttttccatatttttaagcgaaatagaaaaagaaacggaacgcgcagctgccgcatctctgatcgatgcggcagctcattttgctccgttatggcataatatgatttaaaataattcttttttatcagaacctgtatttattactccctgatatccccctgatttctttattactgcctgacgctgagccgcaccagagccctttgaagttttgcctttgcgtttttatactcctgatcagtcaggcctgtacgctccagtactgcctctgcccgagtctttgccgcatctgctctggctttgtcaatatcttccttccactcccaggtagttgccaaaagactgcatttgccatctatcacagaaagcatcccgccaatgcaggctgcctcccgtctggtgccgtcctccatgactacatgggcttctcccatgccaagagccgtacagaaattacagtgcccggcaagaattgccagatcgcctgtaatgcttctgcacacgacacgggccacatctccctcaaacagaagaccatccggtgttccgatctgcaatggaaaggtgctcataaacggcctcctttactgtttctttgctttttcaaaaacttcgtcaatagtaccggagaacaggaaacagctttccggaacatcatcacagtctccgtccaggatcattctgaatcctctcagggtttccttcagaggaacatactgtccgggcataccggtaaactgttctgccacagagaagctctgagacaggaatctctggatttttcgcgcgcggtttacagagagcttgtcttcctcggaaagctcatccatacccatgatagcgataatatcctgaagttctttatatcgctgcagaacctgctgcacacggcgggcaatttcataatgttctgttcccaccacttccggggaaagaatacggctgctggattccagcggatctactgccggataaataccctgactggcaatatcacgggaaagtactgtagtcgcatccaaatgagagaacgtggttgccggagccgggtctgtcaggtcatccgcaggcacgtaaacagcctgtacggaagtaatggaacctttgcgggtagatgtaatacgctcctgcaaagcgcccatttcagtagccagtgtaggctgatagcctactgctgacggcatacgtccaagcagggcggaaacctctgatccggcctgggtaaaacggaaaatattatcaatgaacaaaagtacgtcctgattttttacatcacggaaatactctgccatggtaagcccggaaagacctacacgcatacgggctcccggcggttcgttcatctgtccgtaaaccagggctgttttatcaataactccgctttcctgcatttcattgtaaaggtcgtttccctcacgggtacgctcgccaacacctgtaaatacggaaagtcctccgtgagcagtggcaacattgtgaatcagctccatgatcagaacggttttccccacacctgcgccgccgaacaggccaatttttccaccttttgcataaggacagatcagatcgactaccttgattcccgtttccagtatctctgtagccggagtctgctcctcgtaagacggagccggacggtgaattgcccagcgttccttaatctccggttccggacggttgtccaccggctcgcccagaagattaaacacacggcccagacattcttctcctaccggaacggttataggacctccggtgtctacggccttcatcccccgcaccagaccgtctgtggaactcatggcaatacagcggactgtattatcacctatctgctgagccacttccacgatcagctttgcgcctttattatcaacttcaatggcattgagaagtgccggcagttcatcgtgcgcaaagcggatgtccagaaccggaccgatgacctgcacaacttcgccaacgtgtttctcgctcatttatgaatctcctctattttttgttatcatccaaagcattgctgtctgcagtcagctttacagtccttccgcgcctgcaacgatctctgtgatctcctgagtgatacttgcctgacgggcgcggttataaaacaggttcagctgatcgatcatttctcctgcattttttgttgccgcatccatggctgtacgtctggctgccagctcacttgccagactgtcgcacacgcctccgtagatcagccctgccagatattccggaacaatggcatcaaacacctccgtactgcccggctcataaagtatcagatttcttgttacagaatttttttcctctgattcatttttaagatctgtcagaggaagcacagaaaacacatccggctgctgtgaaagcatggacacaaagctggtatagcaaagctctatgtgaccaaattctccctcccggaattttctgcagagaatatttgcgatttgaaaacagtccccgacagaaatatctgcgatttctccaaattcttccgtaacgatttcaatcttcctgcggttaaaatattctacagccttttttcctacaggcagaaccatgtaatcccgtccggcgctgtcttcttccatacgtttgaacagattggcattatagcctccggccagaccgcggtcaccggcaatcactacataacagaatttttcgcttctggcctctgccgcgtacacagaactgaaatccgtattatttacagcaatatccttcagtgtactgtgcagagtgcggaaatacggtctgcagacttcagcccgctccttggccttacgcagcttggaggatgctacaagttccattgccttggtaatctgcatggtactctgtacacttttgatgcgcagctttaccgctttcatgtttgcagccatactgtctcctccttactgttttgcagcttccgtttccagaaaatctcctgtgaagttttccagagctttttttaatttttcttctgtttctttttccagctttcctgtgctgcggatctcctgcattgccgctgctccgtctgcatccgaatccaggaaactgtacagctttttctcatactgacgcacatcttcggtttttatgtctgtaaggactccgttgattaccgcatacagaatcgctacctgtttttctacaggaaccggctcgttctgatcctgcttcaaaacttctacaatacgtgctccctgctccagacgagcctttgtatccgcatccagatcagagccaaactgagcaaagctttgcagctcacgatactgagaatagatcagcttcagagttccggcaacctttttcattgcttttatctgcgcgtttccgccaactcgggatacggaaatacccgggtttacagccggcataacaccggaatggaaaagttctgtttccaggaatatctgtccgtctgtaatagaaattacattggttggaatataggctgatacgtctccggcctgtgtctcgataataggaagcgcagtcagagaacctccgccatgttcgtcatccagctttgcagcacgctccagaagtctggaatgaaggtaaaatacatctcccggataagcctcacgtcccggcggacggcgtatcagaagagaaagcgcacgatatgcaaccgcatgtttactcagatcatcgtaaatgatcagcacatgctttcctttattcataaaatactcgcccattgcgcatccggaataaggcgcaatatactgtaacggacttgcctcagaagcagtagccgctactaccatggtatattccatggctccgtttttggtaagtgtttctaccagagaagcaactgtagaccttttctgtccaatggcaacataaatacagatcatgtccttgcctttctggttaatgatcgtatctactgccagcgttgtttttccggtctgacggtcgccgatgatcagctctctctgtcctcttccaataggaatcatggagtcgatcgccttaattcctgtctgcagaggttcatgtactgaacgtctttcacagattcccggcgccgggctttcaattgcccggaattcttctgttacaacaggtcccgctccgtcaataggctgtcccagagcattgacaacacgaccgatcatggcgtctcccaccggaacggatactacctttccggtacgctttactgtctggccttcaccaatgctctcaccggaaccaaataatacaatagacacactgttttcttccaggttctgcgccatgccgtagcttccgtcctcaaattccagaagctctccggccatacagttcacaagaccgctggctctggcaattccgtcacctaccagcagaactgtaccggtctcatcctgtttaatagtgttttcgtaatatttgatctgactgcggatgaccctggatatctcttcaggttttaattgcatgtttccataccatcctttaaacaattatttcgtcaagttttctggaaagaccggacaaacggctctggactgtgccatccagaagctttccttccagctccacacgaagccctgccactacagaaggatctttcttctgaagtaaagatacttttttgccgctgatcttctccagtttctgtttcaatgcttccatctgagcgtcacttaaagccaccgcgcctgtcaccactgcctcagcgattccatgatccgcgttataacgcctcctgaattcttcacagcagcttccatattctctgagaatattccgctcacataaaagctttataaaattcaccaaatatttctgtgcctgtgagccaaaggcttcatctataagctttgccctctcctcccagggaacagagggctcgcttaaaagcttcatataatccgcattttcatgaaaaatctgccggatttcctccatctgtccgcctatggcttccacaagctgttcttcgacagcaagctcatacaggctgccgccgtacattctggcagtctgtgtcatgatgtctcacccacattcgcaataaaatcatcaatgagtttcgcgtgatcctcctcagaaatctctctctcgatcaccttacctgctatctccattgccatgccgccaatttcatccttgatctcattgactgcttttcgcttttcctgcgcaatatctgattctgccttggctttcatggctgccgcctgacttgccgcctctttcagaagctcctcactctgaactgcagctgtcttctgagctgccgccacgatctcattggctttatttcttgcatcacgtattccctgctcatactcagacttcatagtctcggcctcttcttttgcttttaccgcctcctgaatctgagcatctgccagttctttacgttttgccagcatattattgatcggcttaaacaaaaaccttttgatcagatacacctgtaaaaaaagattgcagatctgtgcaataaaggtccagggcacaattccgactaattcctgtacctgcataaatttaacctcctgttcttatacccgactgttatcccaggaaattcatgaacatgccaggtgctacaaagatcagcaacagacctgtaacaaaaccataaataccggttgtctctgcaatggcacagccaagaagcatcgtagaagttacgtctcctttacattccggctgacgtccgatcgcctcaagtgcctttgccacagcgttaccttcaccgataccaggtccaatacctgcaataagcgcgcatcctgctccaattgcgcatcctgcaagtgcaataccttttgctaaaatctgaaaatccataatacaaaccctcctgttattttaattttttatgattcctatgattcttctgctgcattggcaatgtacataaccgtcagcatacagaatataaacgcctgcataaagcctgagaaccagtcaaagtaaacagacagaactgcaggaatacccacatcaagaatggggatttttgccagaacatctcctacaatacctggaagaagtcccagaagtgccgagctggcaactgccagtgctccgtagatcagtccgttgataaccacaccggaaagaatgtttccaaaatgtcggcatgccatgctgataggcgtagccagctcagaaagaacattaaacggcgtcataatggcaataggtgttgtaaatcccttcagatatccgcccacaccgcctgttttgatcttctgagcagtgatcatgataaataccacaactgcccaggctgcctcagtggacaagtctgccgtagggcttcgcagcccgatcagactgatcagattggatacaatgcttgtggcaaacagagccgctacaaaaggaatcagatggcggaatttttctcccatgtttccaaccacaaatttattcgcctgctccacgatcatttctgccagcgcctgccgcttggaaatattctccaccttcagatcatgggtcagccagatacaaagtcctgtgatcaggatcataacgatccagcttacgatcattgtctcgctgatctgaatatctcccagaatggggatttccgtcggaatggtaaaatagacctttgctccggatatgtccagttccatgtacgcttccacctcccgtctttttatttttaaatactatggaaaactgctgcgagttatttacagtcagtatttcatcctattttttcttaaaaatcgcattcagcttgatccccatggaagggaacagaagcggtaaaagtcctgcagcaaactgaaaacagggagcaataatagcggctatgccccagcccagctgaagaagcattctctgagaatagctggctttcagtctcatgcgggcagatccctcgtcttcacaggctgcagccttctgtacggtaagtcccataagaaaaaagttcagaacagccactgctccgcctcccaggcctccgaggatcactgtgtaatcaaacggtaccttctccggcatcgtgccatgaagaacagcaaatacgatccacataaggacaattcctgtaagtgtataaatgatcactttttttgtttctttttttactgccggctgaatttcaccaaacatattatatcttcccttctgttattaaatacattatcagctcagttaattacatattttctctcacgtccgtacctgtatgcggaatttctgtatttacacatgtctgttaaaagacacttttttatgcttttttttgtcttcctttttctgttcttccatgatcttcagataaagcttataggctaccatgaacgaacctcccaagccgaaaaagaaccccggaatatagacccatgccccaactcccatatgaatgttcagccaccagcacagggcaaggcataaaaatacaggagtcacaaaggacagaccaaactgtgtgagcatggtaatatttttcagcatatcagcccaatttttcacaactgcattctcctcttacactcatcactccatctccaatggtaagtgttgtggatattttatcataattgtataaaaaatacaactttttattgtgtatattaacgacttttttgttctgtttcattaaaaaatatgtaaatatttcaatcttttcgctgtttttttgcagtgtttcctataagaaattcaaaaaatcccggggaatctgcataaacagactctccgggattcttcctgcatgataaattatgaacatccagactcttgcttatttttcgtactctacaacaacggtttctcccggtactgcagctcccgcatgaggagttacccccttgatatcatccatgtttgtgacgatcataggagttacacagctgtagcctttttctttaatgaaatccatatcaaattccatcagaagatctcctttttttacagaagctccggcttctacctttggagtatatccctctcccttcagggcaacagtgtccattccgatgtggatcagaagctccagaccgtcctgtgtgttgatgccgattgcatgttttgtatctgcgatcatggatactgttccgtctgccgggctgtatacctttccttcagatggctcgatagcaattccgtcacccaggatcttctgagcaaacatcggatcctcaatattttccagaagcactgcctcgccctttaacggtgcataaagcttattgtttttttcttttttaccaaataatcctttaaacatgatcgtatcctctctttcttttttgctactgtctacttcatttccggtgatcctgccaaataccttccggcttatatccgctgacagcattctgttccgtgtgtgccggaattttggcagaaaacacatctgaacacccagagaaatattacctgtaaacagttattacttttcttatcctaacatatctttacagcttatttcaatataatctgcaagcctaaatatattttatactcagactttgaccagaagcagaccattctctctgcccctgacagcagaaaggaggatgccgcagcaccctccctcttgttatgtatattatttacataattttttgaactcatccgctacgaactgaacctgtgtacctacaataacctgtacatttgttttgctcggacggatcacgcctgctacaccggctgatttgatctttttctcatcaacctgagtatagtctttgatctcaagacgaagtcttgtgatgcagttgtcgattgtggacacgttctgcggtccgccaacaccctcaaggatgatctttgcaactgctgtaaagtcgttgtttgcaagaactacttttgtctcatcttcatcgtcgtcttcacgtcccggagttttaagatcaaacttaacgattgcgaaacggaatactacgtagaatacgataaatgctgcgattccaagaggaatgatcagccatgttttctgtgcagccggcagagatgcggagaacagaaggtctgtggcacctgcggagaaggaaaatcctgcacggaatccaagagatactgtaataaatgtaaagataccataaagcagagcatagattacatacagtaccggagcaaggaacataaatgcgaattcaaacggctctgtaacaccgcagatgaaagaacatactgctgcggaagctacaagaccgatagcgatttttttcttgttgtcttttgctgtgtggatcatagcaagggctgcgccagggataccaaacatcatacatgggaagaatccggacatgtacataccaaggctccaggaaacatctgctgatgttttgccagcccagaagtttgtgatatcaccaagaccgatagtatcaaaccagaatacgttgttcagtgcatgatgcagacctgtcgggatcagaagtctgttcaggaatgcgtagataccggcacctacagcgcccatgtttgcaatacctttacctaatgctaccagtccgccgaagatcagaggccagataaacagaaggacagctgcaacgataatggaaacaatacctgcaaccatggctacgcagcgttttccgctgaagaatgcaagccagttcggaagttttgtgttcttgaatctgttgtagcatgtagaaccaattacaccggcaatgataccgataaacgggttctgaatcttctggtaagccagaagctgtgttgcgttttcagcaacgccaggtctgagaattgtaacaactgcttcactgagaagtgttatcatcatcagccaggaagcaagagctgcaagacctgctgtaccatcgtgatcgtcagacataccgacaccgacgccgatcgcaaacagaattgccatgttatcaatgagtgctccgcctgccttaacaaggaacagaccgattgtagggatgatacctgtgatctcccccccccccctgcatggtggccggacacagaaggtatccaatacccataaggataccgcagatcggcagacatgcaactggaagcattaaagcttttcccaatttttgaagccatttcataatgaaaatcctccttctttttcgcttgtgacctatgacaaactttatctgctctttttcgacatttttccaatgttgtccggaacatccgcaataaaatttgtacatttttcacaatcacgttaattcgtgtctactctaacagataatattcgctaagtcaatatgtttttttatgattagtttataatttttttagattttttatatattcttcagttagttaaaagtaatccatgtatcagttcccggacagtacttcccggtatattttcgtatgtttttggttcctgttcacgtaatactgtcccgtggagtttttggcataaaaataccgggacagccgggacaaagtcccttgatttccggcatttcaccagatataataacattatatttttaagaattttcagacttttattacaaaccggaaatggagatgatcttttgcagaatatgacaaaatatgccctgaaagagtccctgaaaaggcttatgctgaaaaaatccctggaccggatcaccatcaatgatcttacctcggactgcgggatcagccgcatgactttttattaccatttcagagatatttatgatctggcagagtggacctgtctggaggaatccagaaaagctcttcagggtaaaaaaacttatgatacctggcaggaaggacttgtacagatttttgaggctgtttacgaaaataagactcttgtgcagaatgcctgtcatgccattggaagagaaaaaattgagaattatctttttaagctcactcatgatctgatcatgggtgtggtacaggaacagtccgcggagctttccattacagaagaacaaaaaaattttattgccgatttttataaatacagccttgtgggaatcctgctggactggatcagccggggaatgaaagacgattatcaggcaatgaccgacaatatctgtaccactcttcacggctgtattgcaaattctattcataattatacagatcaggggaaatgataaactttttatcatttctctttttttgtaaattgaacccgatgcaaaagggcaatactataatatcacgacaaaagtacatctgtttttcagaaaggtggtttttttaatggcaaaaaaaggtatgaagatcggacttgcattggcagcaggcgctggcgccgcagcggtgctggcaaaaacaacctcaaaagagcacaaagctcctgctccggtatcaaatagcgattaccggaatacagagcgcggaaaatatgaaaaaaacagcaaaggaatctattacagcaacggaaactacgaagcctttgcccgtccggaaaagccggaaggcgttgaccataaaaatgcctacattgtaggaagcggtcttgcttctcttgccgctgcctgcttcctggtacgcgacggccagatgcccggctctcatattcatattcttgaggcaatggatattgccggaggagcctgcgacggcatctttgatcccagccgcggctatatcatgagaggcggacgtgaaatggaaaaccattttgaatgtctgtgggatcttttccgaagcattccttctctggaaacaccgggagtatcggttctggatgagtattactggctgaataagcatgaccccaattattccctttgccgcgccacagtcaatcgcggacaggacgcccataccgacggtaaattcaatttaagtcagaaaggctgcatggagatcatgaagctttttatgacaaaagacgaggatctttatgataaaaaaattgaagatgtctttgacgatgaggtattcaattcaaccttctggctgtactggaggaccatgtttgcctttgagaactggcacagcgcgctggaaatgaagctttacttccagcgatttatccatcatattgcagggcttcctgatttcagcgctctgaaatttaccaaatacaaccagtatgagtctctgatcctgcccatgcagaagtatctggaggctgcaggcgttgatttccagttcaacacagaagttacaaacgtactttttgactttaaagacggaaagaaaattgcttccgctattgaatgcagggtaaagggcgtggaaaaaggaattgtccttacagaaaacgatcttgtttttgtcacaaacggaagctgtaccgagggaaccatctacggtgatcagaaccatgcgcctaatggagatgcggaagtccgtacaagcggctgctggaatctctggaaaaatattgcaaaacaggatccaagctttggacatccggaaaaattctgttccgacattaacaaaaccaactgggaatctgcaaccatcacaacactggatgaaaaaatcattccttatattaccaatatctgtaaacgcgatccccgcaccggaaaggttgttacaggcggtatcgtaagctgtaaggactccaaatggctgttaagctggaccattaaccgtcagggacagtttaaagagcaggatccagataaggtctgcgtatgggtatacggactgtttacggacgttcccggcgactatgttaaaaaaccaatgaaagaatgtacaggtaaagagatcactgaagaatggctctatcatctgggtgttcctacagagcagattcctgagctggcagaaaaaagcgctgtctgcgttcctactatgatgccctatattacggctttctttatgccgagaacaaaaggagacagaccggatgtcattcctgacggctgcgtaaacttcgccttccttggacagtttgcagacacaccgagagacactgtatttaccacagaatattctgtaagaacagcaatggaggccgtgtacggacttctgggcgttgacagaggtgttcctgaagtgtggggaagcgtgtacgatatccgtgagcttctcagcagtaccgtaaagcttatggacggaaaatctcctctggagattcagcttcccggtcctctgaatgcactgaaaaaacctgttctccattttattaagggtactgtgatcgaaaaggtcctgagagattacgatgtgttaaaagacggaatgtaacattctgctaaaaggcttctgcaatacatgagcctgataaaaatggttctataataaatgtggttctataataaatgttggggcgcatgaatgaaatttcatgcgccccggcattttttattttatgattctcactgcttttattttttcaccgaatattctccggatattccacaccctcaggaagaggatcccattcattcagccctatactctgcttaaattttgcctgttccagagtcagaggctcaagatcatccttcaggtattccagaagttcatctatcccctctctggtagcgttatccaccaggaatatgcgctcacatcctacattttccagccattgacgaaccatgggaatattggcatgaggcgaatggatcttggtgattacgccgatcataggacgaagaataaaatttttgccccccgggccaaaaagactgaaaggctcgtctgccgcctgaaccatggcaaccacgtccgcctcaaaggaaaaacatgccagtcctacgctgaaatgcttggactccgcatactctccgggagaatcaatggtattgtccgctgtattggtgtattgagttttttcgtaatgaagcttttcccctttcagagcctgtgtcagagaggtttttcccgcttcacttcttcccattaaaaatatttttttcattttatgccttatcctgtttttcagcttttatggacttcacaggttttaaatccaagcacctgatcaaagaacctgacaacttcctccactgcaggctgaacctggctgagccctccggtaaggatcagcgtaccgcaaaacctgtccataaacccaatctgaacgtctgctgccttaatcgccacatccgcagcgacaactactgcctcccagggagtaaaccggatcattcccacagcttctcctctgtgatcctccccctcatgaacaccaatatgaagtcccagattttcataaatacatgcctctgacggactgatcacatgggccagacatacttctttgcccggaacacgcacacgggtaagacgcagccttttccccttcagatgttcataatcatccctgaacagcttttccagcagttcctctctttttatacgagccatgactgcacttcctatctctttgtaatgtcacagactacatatcccagtgaatcccggaagtaatccaccacctctgtgagcgctgacataacatctgaaatttctcctgtaatgatcagagttcctgtaaaacggtctgcaaatcccagatacacgtttccgcttttcactgcaatatcagaagcaatcaccgcagactccggcggcgtcatattcatgattccaattgctgaagatctgtaatccacctgtggattcagaccaagcttctgatatatgatcggagccgggccgcccatgacatgagcaaaagtaatctctttaccggctaccgtttcctgtacgattctaatctgttctccgtggtcgtttggcattttatctgttcctctctttcagaaagtttctgacacaatttctctttataaatcatactatcgccaaaattttatgtcaagttgatttcttttgaaaaaccgttaaaaaaccgctgtttctgcgtatatccagaaaactttccagcatactcatggcaagtgttttgccaaaacgcctgggacgggtcagaagtgtaacctttgccgctgaatttttaagaagttcaaaaataagcccggttttatctacataatagtattctctttttctcagttcttcaaagtctgagaccccgacaggtatattcagtttcataaaaataaccgcccccttttataccatctatgatataaaagggggcgtaaaaaatcaaggggattatggcaggctttacaatccggttttttcccgtataaattttcttgcattcaatgcatactcaaagggattcgcttttgcaggatcctgctctgcctctactaccatatatccttcgtacccggcagcttccaatactctaaatacagggtcaaaatcaatagctccatcacccggtattgtaaatgcgcctaaacgaacaccttccagaaaactcagtttttcttccttcactttctgtactacttccgaacggatatccttcaaatgtacatgacgtatccgatctgcatatgtttgggccatttccagagggtctgctccacagtaagcaaaatgtcccgtgtcaaaaagaaggcttacatattcaggatctgtattttccatcagacgttttacctcgtccggattctgaactacagttcccatatgatgatggaatgtaagtgtaattccataatcttcctttgaaatcctgcccagacggttaaggcctgtacacagcacttgccattccgaatcgtccataatatatttctgaccgaacaccggcgtattctgctgtccctgcacgctgtagctctgctcagaagcacctatgatctttgcacccatatcctgtaaaaaagtaagctgcgctctgaattcctgctccacttcttcaaaaggctttgtaagcaaaaagcaggaaaaccattgattacagatttcaatacctctgagttccagagcttttttcaggatttcaatatcttttggatatttatttcccacctctgatcctgtaaaacctgctaatgccatttcactgacacactgttcgaaagtattttcacctccaagatccggaagatcatcattggtccatgcaataggagcaattccaagtttcaccttattttggttaaacattacaatccctcctctgatatgatctcagcaatagaaacaggcctgtgttcctgacaggatttctttgctgccagccccatcaacactggtttcagaccatcttctatattcagaggtgtttccctgttatttacgatagcattaataaattctgtaatttctttcccataagcatccatatatctttccagaaagaaaaacagaggcttttcttctgtcacaccatccgaattactaagctggacagatgactgactgtcattggatacagatgccattccaagcgagccaaaaacttctgctctctgatcatatccgtaagcggctcttcgagaattatcaatcacggcaagagctccgttctgcattttaagagtaacaatagcagtgtccacatctcctgcctgaccaatagccggatctactaaattcgcactctgtacataaatctcttctgcatcacagcctgcaagaaaacgtaccatatcaaaatcatgaattgtcatatcaaggaatattccgccagaaacctttacatactcaggagacggaggctcaggatcacgggaagtgatttttataatttccggttttcctacgtttccacctgctaccgtcttctgaagagcctcaaagttatgatcaaatcttctgttaaaaccaacctgatactttagtcctgtaccttccagcgcttttataacttccatgattttttttacatcatgatccaccggtttttcgcagaacacatgctttccggcacggatagcttccagtgaaatctgcgaatgggtatctgtggaggaacagatcaaaactgcagaaatctccggatcgttcataatctcatgataatcctttgttgtatgttccactcccatagattttgcccacacttcagtttccggagtgagaaaaggatctgccaccgtcttcacccgagcttccgccactcttgtagcaatgcttgtaatatgtacttttccgattcttccagcccctataattccaacctttatcatagtatatttctccttttcagaatctgctctttatcagtaaaaatctgcttcatgcatccatacataacgttcatcctcgcaccggtctgtctgaagccagggatctccttcaagatgccgtatcatccaacaggtgtacatctgaaatcccggagccaccgcctgagggtgtagttctccaccgggaatcgcagaaaaactgccctctgtacttttaaatacctcatttcccacaaagcttgctccaaagccttccggacggtcaaatttaaaataatacacctccggctgaggatgtctgtgaggcagatatcccgaccagtttcccctgtcattcagaacctcgcccaaaaccatgttggaacacggagctatatcatgatcaaaaatcgtattgaccctgcgatttgccacatttccgaattttcctttgcaggaatatttccagggggcatcctccggatcataaagcttcgccgcaaaccgcctgtcattataagtacgctgaaccagaatttctgcattctcaaccgctgtcaccataatcttttgtcctgcacagacatgaagacaccagggcccctgcgaaaagacatcctttctggaaacctcccgaagattttcatcccaccgaaagatcacctttccctgaagaagaagtactgccatttcctcatcttcaaaactaaattcccgcacttcctctgcacgcatctgatacacacggatatccatgttcatatctttatattcattctcatatgttgtaaggattttttcgccgttttcatcaaaatccggccagccaaatacatttgccatattttgtctccttaatacgccctagattcccgacgtcccttttcaacattctcccaggcctctctgacgctttccttttcggaaatctctgcaagtcctacattccaccatgcttcatacccgtccgtcatagttttggggattaccttcaggtcaaaaagacatgccctgtcctgtttctttgcatcctcaagcgctgcttccagctcttctatagtccggcaggtataggtatgaagtccatacccctgaccaatttttgcataatctacagggatcagatctccacatggctttttgccgtctgtataacgaaattccgtagcaagacttccaattccatgattcatttccagattattgatacatccaaatccacagttatcaaaaatcaggatatttaccttttgtctttcctgcataatagtcataatttcactgtgaagcatctgaaaactggaatctcctaccacacaatacacttcattttccggctctgccagcttaactccaagagttgctgccacctcgtatcccatacaggaataaccgtattctgcatgatatccgcctctcttatctgttcgccacatcctctgcatacagcttggaagagagcctccagctgtaatgatcgtggcatctttgtcaattgttctgtttatcacagcaagtgcggctgtctgtgtgatcctgccctccgtaagccttacgaattccggaatcgtccgaggatctcttgcctgaatcaaaggctcaaaatcctctcctgtatacgcaatacctcccaaacgttcaagttccttatcccactcctcttttgccttaacgacctcatcagtataggcagaatgataacctgtactacgaaggatctccgttaaagcttccatagttgcccgggcatctccaactgcttttaccgcatccattttatatgcatgataacgactgtaattaacggatacaaatcttaccttttcattccggaacaaatgcttggaactggttgtaaaatcagacattctggaacccacggcgattaccacatctgcatcttttgcaataatattagaggccagggttccggttaccccgattccgccaaggcagtatggatgactggaacggcaggcactttttcctccctgcgtttctccaaaaggaataccaaactcctcacagaatttttccacaacttcccctgcctcagaaaaacgcactccgcctcctacgatcaacaagggcttttctgctccccggagaactgatgcaacatcctccagctcctctttaacagcaataggacgagtgatcctgtgtactcttttccggaaaaaatattccggaaagtcaaaagcttctccttccacatcctggcacagcccaatacagcaggctcctgtttcagccggatctgtcagcacacgcatagcatttacaagcgctgtcattatcatttccggtcgggtgatcttgtcccagtatttgcatacaggacgaaacgcatcgtttgttgatacagccagacttgaacttacttccagctgctgcagcaccggatccggctgccttgaagcaaaggtatctgccggaaatacaagaagcggaatattatttaccgtagccgttgcacaggctgttaccatattagcggctccgggtcctacagaagatgcacaggcgataatttttttccgtccattctgtttcgcatatgcaatcgctgaatggcacattccctgctcatttcgcccctgaaaaactttaagttctcccagatcactgtccaaagcctcgcccagacctacagcaatcccatggccgaaaatagtaaaaaaaccttctacaaattttgtttcaactccatccatggaaatatactgattatccagaaaacgcacaattgcctgcgctgttgtcattctgattgtttctgtcatatttatcacctctctgctaagctctggcgatcatttctccaaactgttctttttcctttttgataaattccagcacttcctctgttccgggaagagaatccgaacagttattactgcgtaccatcatcgaggcctccgcggagccaaattccagacagtcaatgatatcccagccctgatacaaaccataaagaaatcctgagccataaccgtctccaccgccaaatccctttcttgcttccaccggaaacggcttaatgctgaatttctctccatcagcagtgtaggctgtggagcctttcattccatgcttgatcacaacaatcctggcattacagctctgccagtaaaccgagctttcttcatcagtcatccccggacatatcaatctttctgtcagatcaaactcttcccttgaacccatgataatatctgcttcccgggcaacggcagaataataaattgagatctcatctttatttttccagttgtattcccggtaatcaatatcaaagattatctttgttctattttttcttgccagcataactgtttttaatgccgcttctctggacggactttctgcgagggctgttcccgaaatcaacacagcttttgcatttctgatatattgctcgtcaatatcatccacatgaagctgaagatccgcaatacggtttctgtacatcagaatatggctttcactggaagacagcatttctgtaaaagtcagtccaagcttttctccacctgtacatacagaaatatgcgaagtatcaattccctgctcattaaagtaatctacaacaaattctccgaactgatcatcagagacttttccgataaaacctgcctttaatccgtgtcgggtaactcccactgcaatatttgcaggggagcctcccacatatttttcaaacatatgtactttctttaaaggcttaaattcctcttttacctgatcgttataggccggattaaaatctatggcaacccttccaagcaggataagatccataggtctgttctgttcaaattctatgtagttcatttatacctccatagtttcgggctttgccgaaaaattgaaatttcagatagttccgtcccaggtagacactgttttggcttttttctcctcttcgtcaaaccaacgggttgttacaaccttgcgttccgtataaaagcgatatccgtctttgccaagagtatgaagatcgccaaaaaatgactgcttatgaccgttgaacgggaacataccgattggaaccgggataccaacatttacgcctaccattccaccgtctgtataacggacaaattctcttgcatagtggccattctgagtaaagatcacagagccgtttgcaaagggattggcgttcattaatgcaagaccttcctcaaaattcttcactcttttaatacagagaacaggtccaaaaatttctctgtcacctactgtcattcccggttttacatgatccagtatggttggtccgaggtagaatccgttttcaaatccttctactgtaacatttcggccgtccagtacaatttcggcaccctcttcaattcccttttcaatccacttcacaacagactctctgtgttttgcattgaccacaggacccagacctgttgttttgtcataagcaggacccactttaagttcctttgctttttttacgatcgctgctaccagttcatctgcaatactttcctggactactacaacaggaagagccatacagcgctctcctgcacatccaaaagaagcgttgataatacctgctgccgtacgctctataggcgcatcctcaagcacgagcgcatggttttttgcctcgcaaagtgcctgtactctttttccactggctgctgcctgtgaataaatatgttttcccactgaagtagatcctacaaaggtaattcccttaatatccggatgacttaaaaagatttccgcctcatttctggaacaggttactatattgataacaccgtccggaagtcctgcttctttataaatatcagcaattctcatacaggtctgtggagtaaaagttgcagccttaataacaatcgtatttccacaggcaatacagatcggtgtcatccagcccatagggatcattgccgggaagttaaacggaacaatgccggcaaacacacctaacggttctctgtacgaaactgtatcaaacccctttgaagcatccataaggctttctcccatcataagggacggagcagaaatcgcctgctcggttccttcaacagctttcagtacatctccttctgcctctgaccaggcttttccgttttcctttgccacggacattgtaagttcttccatatgctcatagagaagttctcttactctgtaaagaatctgtaccctttttttcacaggagttgcagaccaggaaggaaatgctttctttgccgaagcaatggcctcctccacctcagccgctgtacaacagggaacctttgcgatcacctctccggtactcgggtcaaaagcgtctgtgtagtgctctgtagaggattttttccattctccattcacatagtagcccagtgtttttatttcacccataactttctcctttctcaaccgctctttattcctgtcctgctgctttaaaacaaagagtatacatatcttttctgtaattctttaaatgcagccttgtacctgatgccgttttttcagattctgtctgcagttctttattaagtggggtcagttctccaaagatattcgggatgtcaaactcttttgttccctcttcaagaccatccacaaacacataaagatctgatccttttgcagtaaaatgtacagctgtatcattatccattacaacagattcccttctgctgcatcgcgtaccataaattccctctccgttagtctcaagccattttcccagagccagaagacgtttctcctgttcttttggaatcgtaccgtctgcttttggccctacattaatcagaagatttccattattggcaactgtccctaccagaagtgagattaaatccttttctggtataatctgttcatcgccttcattttcattatatccaaaagataatcccatgccgcggcacatttcccacttttcgcttcgatcaacctttccctgcttgtattcctttgtgaggaaatcacgaaaacgaccgttaaatctgtcgtttacaacaccttcctcaactttattgtaataatgtgcaaggaagtacggcatcatttcctcactctgcttcggccatccgatatcattccagaacacactgggttcatatgtatctaccagctccatcatctgtttataagaataatccgcatattcaaacgtgggactggaggttccaaaaagatcatcatcttcaaaaataggatcattggcatactgccagtcgatcagtccggaataataaagtcccatacggattccttcagcccgcacagcattggttaattcacctgtaatatctcttttcggtcccattttcacacagttaaaatctgtgtacttacttggataaaggcagaatccgtcatgatgctttgttgtcaggactacatactgcgctccggactttttaaacagcttcgcccacttgtcaggatcccagttttccgccttccacataggtgcgaaatcttcatatttaaagtctctgccatacttttccacatgatgatcataggtatgcccttttccgatattcagtgaattataataccattctgcataaggattatccaaaaaccattcctttgaatccacctcgcccagttcccaggtatggggggcatatgcaggaaccgaataaagtccccagtgaataaaaattccaaatttacagtcatcataccattccggaacctgatgtgtttttatagattcccagtttccaataaatctttttttgctcatgccagcctcctttctgccgtttttacaggcatcccgcacatttagtcaatggttatttttaatacaacaggcatatctcccggttcgatcacttttccgcaaaaaatcttcagagtctctgtccggtcaaaggtcggatgcagttctgttcccagaagttcaatatcccttatagatgattttaaaagcttcatatcatttccgagagattttatatgaatttctccgtcctccggccagtgcagcacaatagcataaatatgattccccttacttgtaaaacggatatcctccgaggtaaacttcttctcataagtatctgtaaaatgtccctccggaactacggtaggtccttcaccaaaaaccttccagtattttgttccgtaaatagcctctccgttcaccttcatccattttccgatctcccggaggatatgggtatcttcatcaggaatagttccatcagatttcggaccgatattcaaaagtaatgcgccgtttttgctgactacatcgaccagatcaagaacgatatccgatggctttttgtaatcatttccttctgtataaccccaggaatttcttgcaacagacgtatcattctgccagagatccggagtaatatggtcaagctgtcctctttccagatcctttaccgcacttccgtgaacatacgcatcaaatttcgcgtcaatagcaacctgaacgccccattcctctgcacgattgtaataataagctgcaaaccttttaagatacggcttccatgcatactgctggatccaccagtcaaaaaagattaatttcggacgatacctatctaccagttcacaggtatggacaagccaggtttccatatgttcttctgagggcggattatcataaatatttgtatgatctctggttattccggctgctgctccataaagtgcagcatactccggattattcacatctgcttccggtatctcgcgcgcaccattaaagaaccagtaattttccgcacggtgggtagatgcacccaagaccatatttcttccttcaatctcagtcttaagttcacccaggacatctcgttttggtcccatttgcgccgaattccagcatcccagctcgctggcatacattttaaatccgtcatgatgctctgctaccggaactacaaactgagctccggcttcctgaaacaattctgcccactgagaaggatcaaacttttcagccttaaacatgggaataaaatctttatatccgaatttatccaatgtgccatatttttttacatggtgaagattttcagccgttccttttttatacatattccttggataccattcatttccaaatgcaggaacactgtatacgccccagtggataaaaattccaaactttcctttttcataccataccggtgtcggatgctcacacagagaatcccatgtatctgtgtacggtccccgtgaattcacttcgtcaatttttttaagatattcttttttatccatacggtttaccccttaattgcttcgaatatcggctcttcttctataagttcaagacacacgcagaaattcttctgggaacgaagtttctctggaagttctacttcaatcataccatcgccttcacagcatttcagcgtactgtattccaactgttctcctgtacttaacacataagcgccttttaattcgtttccaatattaagaagctctatacgggttcttggagaaagtacatgtacataaagtttgtgtgctcttcctgtaagttcaattcccggaatttcatatgcataaactcccagaggtcttgttccaaatatagcctcactgttctcagtaacatattttcctacttcatcaagaacctccacacatttttccggaacagttccttctgccgtaggtccaacattcagaagataatttccacctcgacttacaatcttcaacagacgactgataatatcatccggttttttccagtttgtatcaaatttattgaatccccaggtatcatttacagtagccggtatctcccagtccccttcatagggaagtcttggaataaaattatcgccggttgtcatatagtcgcccatatgatttcctgtacgtccgcttaaaaggcaatttggctgaatagattttacaagatcgatcagttcctgcgtctgtgcaacggtgatccccatcggagtatcaaaccaaatcaggcaaatatctccataattttccagaagttcctttatctgaggtttacatttttcatccagatatttctggaaatcttttcctgaattatcctttctgtgcatatatccgttgggatcatcccagtcctgtgcctgagaataataaaatcccattttcacatcgtatttctcgcatgcaagctgaagttccttcagaatatcttttccatacggagttgcttttaccacattaaaatcactgactttggaatcatacatggcaaaaccttcatgatgctttgcagtaagaacgatatatttcataccccactgctcttttgcacgttttacaaaatcatctgcattaaagcctgtgggattaaactgttctgcaagctttctgtattcctctacgggaatattcagatcattttcaatccactctgcaatcctgtcagttttgatccctttgtactctccggccagaatactgtaaagtccccagtggataaacagtccatatttcgcatccttgaaccatttttgttttgtatctttcataatcgaaaccctccatatatagcacaaaatatagcacaaataatatgtatcaaccttttacagcgcctgcgagcatacctgcctccaccttctcatgaagaaacagataaatgatcagcattggtatcatggacataatgacaaacgcaaactgcggaccataatcagttgtaaagtttgctgtaaaattcagcattgctcttgaaatcgtatacttattactgtccgtaatcagaatcagtgaaaatatcagttcactgtaaccataaataaatacaagtattgcttctgttgcaatgattggcttacagattggcgtaatgatcattgtaagaagcttcaaatctccacagccgtcaatttttgccgcctcatccagccctctgtccaaccctcggatatatccggtaaacaaaaagattgcctgagacagattaaaagctgtatagatcagtatcaggaaagtatagctgttcttcgttccaagcgcgctggaaatttttgatacagaaaccagagtacaatgtacaggaaccataacccctgccataaataaaaagtaagctgctttcagatatccaaaactttttcttgcaatcacatatgcagccggcatcgcaataacaaccgttacaatcagtgtaacaatagctacaaacagtgaattcccaatagatcttaatgcattggcaattctgatcgcatccggataattctgaaaatgcagttcctttggtatggaaaacattcccagaagaatttcgtcatttgtttttaatgaagaaataaaggttacgatcaatggaaaaaaggttacaaccgccataaaaacagcaataaaatattgcgcaaaagtctttattctttttgaagttctgtagtttttcattatgttctcctttcttcaaggaccggttatcctgccagttatcagtctctctctttaaatatcacgttgttcagcaataccgacaatccaagtcccattaccagaagaataatactgatcgctccacttcgccccatgagcttatactggaagccctgcgtataaagaagaacagctggtgtggcactggaatccataggacctccgccagtcattgcccacacaagatcaaaagccttcagacatccggtaacacagataactgagaataccataaacatgtttttacagagcggaactgtaatataaataatcttttttaaaccagtacatccatccaacaaagctgcatcatgaatttcatccggtatcgcaacaataccagccgcaaaaataagcatattatatcccgcatacatccactcatttaccagaacaatacaccatatattgacagtaggtgttgccagccagtttataatatgttcttccagtcctattgctcttaaaaactgtgcaagaacgccaaaattagcatttaatataaatgtccacataagtcctacagccgttgttcccaacatgaccggcattaaataagatgtcttaaaaaacttgattcctttcagcttggatgttacaagaagtgccataccaaaagcaataggcatcaggatgcagaaaccgccaatcataaaatacagcgcattcagcatacttttccagaatttgtcacttgtaagaactttaatataattttccaaccccacccatgttaccggcgctccgccaataccattccaattattcaaagacagccatgctgtatttataacaggataaataacaaagacaactgtcagtacaacacccggaagaataaaaagaatagatttcagataggactttctgtaattttttgattttagaaacataatcatccctccaattataaaaggcggatatcaccgaacactttcgctggtgacacccgccctgcattatgtattcaatgcattacctgtacttattttatttattcatactctgcaatcagatctgtaattgtctttcctacatcatcaactgatgagcccattgcaattccctgaagtgcctgacgaacagtattaatcatatgtgttgccatatcataattttcaatatcgccgcgcacttcttctgtttctgcaataatagcacttgcctccttgctcagatagtttcctgcatccgttgtaatttctacacaaagcggagatggataaccttctgcaaaggtgttgacaacttcttcacttgtcatatatttaaggaaaagaacggatgctgcaacttcctccggatcaccagtatctactacataataggcctcatttccaccgcccatatcctgaaactcaaattcctcatttacatacggaaatcgcatggcatgaattttttcgttgtcataaatttccacgccggttttatcttctgcacaataccaggttcccataaacaggaaagctgattttcctgtattaaaaagagacctttcctgcccatcgtcaatacccagaaggtttgtgccaagatatcccttgtcagcagcatctttaatcatctgataaatttccttctgttcctctccatcataagcaacttctcttgttccaagcttttctgccatatcacatccatatgttttatagtttaacgctgaatgaagatgtccaaaacggtaatcatctttctctcccatttcaaaaggctgtacgccattagatttcagcttttcgcaggctgccataagatcatcccagctcttaatagatgccggatctataccattttcattcagaatatcttcattatagaaaagcattacctgatatgcagtaaaaggaattccataactcccttcatatccatatgtactgaaatctgtaagactctcacccatagcgttaaatctttctttccattccggatactgttcataataaggtgtcatatcaacaatcaaatcctgctcaatatatccagctgtacgagaaccgccatattcctgaataatatttggcatggagctttcatcagacataagaacagactctgaattcagccattcggactcagtaggaatgttaatacattcaacagtaatcccaggatatttttccataaaaccatccacaatatcctgatagagaggacctgagatatccgcttcatcccatctggtatgaagagtaatcgtaacatccttaaattcatgattctccacatcgtaatccacagtctcatctgcaaatactacgcttccagtagatgttaccattgcaagggctgtcatggcagcaatcatttttttcttcattttgttttctcctttcgctttaattaaacgtttcgttttatttgtgtttttattttacccccccccctatcatttttgtcaatattttctttttatataagtttttttcagcatttttacataaaatttttatatttttttggtattattaactataatcgttttgtttttatcttgtttttcaccatataagagtatttataatctatagtatagaattgtaaattctgaaatttcatgatatcattaagaaaagttatacagatgttctcatacgaagccgttgaaaggagagctctatgaagataacaattaaagatattgcgaaagaaacaggactttctaccgctactgtttctaaatatctgaacaatataaaaatacaggaaaataatcgaaaactgattgaggatgcaattcaacgtctgggatatcaccctaatcgttctgctcaaatgctccgttcaaaaaaaacgcgtactattggtgttcttatttctgatctgggtaattacttctgggggcctgtaattggaactgtatcacattattttaccagccgccaatatactgttattacctgctcctacaattttgataaagaacgtgaaaaagctgtcattcaggatattatttctcaaaacttcgagggactggttatgcttccttttgacaaccaggattactattatcacctgcttcaggaggccggaatccctgtcgtagtccttgaccaacttccagttatgagacaaaaatatcctgtagactgtgttctttctgataatcatggaggaagtgctctactcgcagagcatctttttcagaacggacatagaaatatatatatactgaaccactctaagtactcgtatacaatagaaaccagagttcagacagttttagatatatacaggcaacatggaatcaagctttctcaaagtccatctgatgatgcacctattattttttccgaaacccaatctgttatttttcagaataaacaaaggcttcagaaaatattagaaagtgattctccacctactgccattttttttactaattatctggctgcaatgggaggattgtcggcaatcaattctgtctctcttaatgtacctgatgatatttctctggtatgctttgattatgatccccttttccgggctatgcatacttccatgacctgcgtcgcacaggatcttacttctatcggaaatacagcctgcgaaatcctgcttcgtcgtatttgcggcgactacagtaattttccctgtacagaatttgtaaatgtgcagttccattctggaaaatcggttcgaaatctatatgcaggacaaaaaacattacatcataagaccagcaaacctgtctcaactccataactctctatataacagactgtcgtgcatacataaataaaagagtacagttcctcataagcataaataaggactgtactctttttctgttctgtttctttattatgtccagctatattctccgttttcttttactccgtaaaagtctccgaagctcaggctgaatattctgtctttcttatcactgagatcaatctgattcttgatcaggtactgataaattccgtcatgggaaatatcaccctgctgaaggaatcccaccagtttattgtctgtaaagatcgctctctgatactgatcggctgcctctctggcaataacttcatctccctcttccggattcagttttcccacacacagagaaaccaggccaaagaaattaatggtgttctttgcggcaaaacggtcttcatactgatatttattgccaaggaccatattctgagctgcaattttgccctgcttctgagcatttggccagattccggaaagtcctgtcacatcacctgctgcataaacgtctttgacacttgtttccagataatcatttacctggattccgcggtcaatgagaataccactgtcctcaaatcccgctacagcgcttctcactccggctgctacgatcaccagatcacaggaaagcttctctccatcatccagaaccacatgagtaacttcaccggcatcattgcagacagtatctgcgcctcttctgccaaggcggaactgacagcctgcctgttcaaaaagcttctggtactgtgcagctcctgtctcatccagctggataggaaggatcctgtcagccatttccacgatcacaatgtccttcttctgttccagaagtccgtaggcagcatccagtcctaccagtccagagccaatgatcacaactttctgagcgttttctgcacatttgtcaattgcttttgcatcacttaaatgacgcagcccaaatacattcggcgcagtacgaagagcccccacaggaggaataaagctttctgctccggtagcaatcagaagcttatcataagaacatacaaagcccttgtcacagatcacctgttttttttctgtatccagcttttctactctctgtcctgcagcctgggtaatcctgtttttctcaaaaaaatctgaaggaacaaaattcagtccgtcttcatctctttcatggctcagatatttgtggagcatacatcttgaatgtggcttttcatctacagaaatcattacgatatcatcttccggagccagttcacgaagagttttggctgcagtcatacctgctgcgccgattccgattatcacatatttcatatgttatacctcctctacgtgaattgcctgcttcggacaggcttttacacagcttggctctccgccaagatctttgcagaaatcgcatttgatcactacagattttgttgcatcatccggcttcagaaccccgtacggacagttcattacacacataaagcaggaaccgcatttctctttgtcataataaacatgtccatcctccggattcttggtaagagcgccgctcatacaggagatcacacactccggctcatcacagtggcggcagaaaatcggacggtaggagccgtctggctgtttatagataaagttacggctttcattattaatatcgttcagatccagggtataaatatctccggaatcctttctgtgtgcctgcatacaggcaaggctgcagcttttgcatccgtcacatttttcagcttctatgataattcttttcatataagcagcctcctttttaaatattcaggccagcacgtttttccataataatcttttccagaatatctgcactttcctttgcatctccgttaatgattacctgaccgcctgtaagctgtttcatatcctctgtcagaacctttgtcaccagcttgcttccggttacaaatggcggaagtccaagatggagcggcaagcccagagccagaccgaagcatccgtctgcaagcgcctgctcttccagccactgtgctgcagaaagtaccagcggaagctgaggaaggtctacgccgatttcttttgccagctctgttgcaacaatctccagacggccgattgccagacagggaccaaagtttaatacaggcggaattcccagtttttcacagactgcgcgaagcttcggacctgccagctttgctgcggaaggctccataagaccacagttctccagaccgcctgaagaacatcctgctgtcaggacaagaatatcctttgcgatcagctcttttgtaagctctacggaaagcacatcatgtccgcctgctgtcagattagaacatcctaccacgccggcaattcccttgatatctccggatacgatcagatcgatcagcggcttccaggtatcgcccaggaattttttcagagatacttcacttacacctgttaaggtatcgtcgtttccgtgctccgggaacagattcataggaacattgcctctgcgggccttatatgcttctacgatctcgtcaatgatttccatgctctgctcttcacgtctgtcaaaatcaaaaggcatcatttttgcatttgctttttttgccacatcatccagacatatctgtttgatcttcagctcatcacagatcggttcaattcccggaagagtacagttaaactcagaaagaactgcgtcaattccgccggtggcaagaaccgcttcacttgtgtagttgtttcctgcgtgtccttcaaatacctctgtgtaatgagcgccgcgaagctgaagatcctgtcctacgcaggtacagcctacaagcttaaagccttttgcacctgccgcctgtgcctttgcaactgcttccgggcttttcagtttttcctgaagatcaacaaaaattgtatgctgatgtccggtgatcataatatttatgtattcagggtcaattacgcgaagtcctaccggagccatgcggatctcaggctctcccaggagaatatcgttcagaagatttgtcagtgtcagtccgtaaagtcctgtggaaattccaagcttcagacagtctgtaagcatatcaaccggatcggaattcaggtttgtagaacattttaccactccgtggaatacttctccctttgcacctcccggaagaatccccagttctttccatctctggaaacgcggtgcataggcaagcttttctaccagctccattttttcatattccggcttatacagatcatccagaaccttacgcgcaactttttctgccttttcgtaaatgtcatcacatacaatgcccatttcatctgccagatagtttaacgcattcaggcctttcagttcgccttttgcctgtgctgttttcagtacgttcagtgcagtattttctacaatgtggatgtagcagccggagcctgatgccactgctcttaaaaagtttcttgttacaataacatctgcagttgctccgcagattcctcttggcgcctttggtgtgatacggcacggtccgttagagcagagtctgcaacagacaccctgaagaccaaatccacactttgcactctgtccctctactctgtgatgggaagtttccataggcagatccgcgataaatccttccaacggcttatctgcgcttttgcaggtagagcatccaaaacactgattcataattgtaccctccatttttcttgattgacaatattttatcattctggacaaaaatagtcaactatattatttgataaatttttcactatctgttgagatcctgaacagactcccgataaatacaggatggcatcatcctgattcttttcggataatcactttcatctccattcatcctgcgcagcaaaagctcacaggctgcatctgccagttctgcaagcggctgacgtactgatgtcagttttggatttaccataacagacagctcaaaatcatcaaaaacaacaactgacagctgctcgggaattctgattcccaaatcataaattgcctccatagctcccatactcatgtcataatttgtaacaaaaacagctgttggtttttcattaagcttccacagctcatgaattcccagatatcccccctgatagatataatccccctgaacaacatattccggtcttacaggaattccataatcctccatagccctgaaatatcctttcattctctcgctggcagtcagagaatttctgcgtccctcaataaccgcaatactggaatgtccgttttttatcagatgctccgtaatctcataagctccctgagtacaacttgtctgtacacaatccccctgtatgactccactgttttcctcaatagtaaccaccggaatcctcagattctccggaaaaatcagctgaccttccgtatttcccggaattgtgatcaacattccatccactccatttgaaatcatatactccacatattcttttgttttatccagattttcgtcaaaactgaaaaacgaaactgaatatccatggtctctgagcttcttttctatttcattcagtatcgctgacgtatgaggactgtttacaattcctgctattacacctactctgtaagttttgcttgtccgaagccatcgggcagtattatttggaaaataattcagcttttttactgctgcctcaatcaactcctgattcttttttctaactgtacctccattcatatatttggagattgtagaaatcgcaagattcgtttcccgcgctacgtctttaatggttgttccacttctgtccttctttttcatattctgtccccatgcatgattaccacacaattttcccctctgaaaatacacagaacggtttctttcagtatatcagtttcctttgctttgcgcaatgaaggcagccttgtttcaggctttatttccgcctctttttctgtgtttccttcttagcgtccggaacttctggcgctttaatttattttgactttcttctcccacacttttataatataaacatgtcagaaagtttttgctccatatggacttcctgactttttcacttaaaaacatctgcgcagaatcatcttttactgctgcaggttcatctaaacggaggtacatgaatgaattacaaaatcgatccgcagtcctggaaacaggatatgcccgctttcagaaaaaaaaccatagcattttataacggcgaaataacaaaaaaagactacaaaggcttttccggtctgtacggaagctatgcacaaaaagacggaaaaaagggaatgctccgtctccggatgactgccggaagaatcacaaaggaaaagcttgcttttacagcaaaggcgattcaggagcacaagatcagccgtatccattttactacctgtcagacagtccagcttcatgatcttcagccggatactatctgcacactggcagaagaagcgctttcctcaggtattgttaccatgggcggaggcggtgatttcccccgcaatgtcatgtgttctcctctttccggtgtggaatcaggcgaatattttgatgtgctgccctatgcagaggctgccggagaatatcttatgaattttataaaagctccgaaaatgccccggaaattaaaggtgggattctcaaattcacctgccaaccttactcatgcaacctaccgtgacctgggatttgcagcaaataaaaacggaacctttgacgtatacagcgccggaggacttggaaacaatccccgccttggtatcagggttgctgaatctgttccgccatcaaagattctttactatattaaagccatgtggctgactttctgcgcatacggaaattatgaaaaccgtgcaaaagcaagaacccgctacatgcaggattctctgggcggcgctgaaaactataaaaaagcatatctggaaaaattggatgaggtttttgcttccggagaggatctggatattactgtaaatgtttcctcggtatccaaacagccggacggcaatactccggaaagttcccgtgtgattgcccagaaacaggagggactctacactgttatctggcatcctattggcggtcagccttctgttgagtctttctgtcgtcttgcagaatatcttgcgggcatcagagatgcggaaatccgtctttctccggatgaaagcgcatatattgtaaatcttaccggaaaagaagcagaaaaagttctggaactgacaaaagacggagctgaatctctttttgaaacctctgtaagctgtatcggagcttccatctgtcagatcgggcttcgcgactctcaggagcttctgctctcctgcgtaaaagcagtccgtgacgcagaaattccggacggagcccttccacagatccatatttccgggtgcccgtcctcctgcggaacacatcagaccggagagatcggtttccgtggcgccgcaaaatctgtggacggcaaagttcatccggcttttgtgctttatatcaatggctgtcagacacagggaaatgaatccatgggaaaagaaatcggaaccattcttcagaaagatattcctgagtttcttgttacccttggaaaaacagttgccctgtccggacaggatttccatacatggagaaatgccaatccggaagagcttgaacgaatggcagcagactatcttattgcataacaaataggacaattctgcttcagaccccctcagttcctgaggatcgctttatggtactaaaaatgccgcagatctgccggtcgccctggttacgtattttatctgtaaaaccaggtgtccgaaagcagttctgcggcgttttttctgtaaaaattaaatatatgttctctccagattatttcaggccagaatggtatgctccaacagtatcttaactcccataaggatcaggacgatacctccggcaatttctgcttttgatttatattttgccccaaaccggtttccgatcagaactcccgcacaggaaatcacaacggttgtaattccgataaagctcactgccggaatgatctgaaccttcagaaacgcaaatgtcactcccactgccagagcatcaatgcttgtggctacagccagaggcagcattgccttaaatgtaaagcaggcgtccagattttctgcctctcctccggattcccggatcatattgataccgatgagggacaaaagaataaatgcgatccagtgatcaatgctctggattttttcctggaagccagttcccagaagatatcccaccaggggcataaatccctgaaaaaatccaaaatacagtcctacggtcagaatctgcttttttctgatctgacagacagaaagtcctttacagactgccacagaaaacgcatccatggaaagtcccactgcaagtacaaaaagttcccataatcccatttgattttcctccaatgtaagtattttatcagagaagcagtaagcacagacgatctgcttttcttgcacagggcgcaaaaaacgagactatccgccctgtgcagataagtctcgtcatttcagatggggccaggatctactccagaatgttgacctcatcataccatttttcaaaaatcttatttttccatatgataccgactactcccttatgtcggttcagtataccagaaataattctgtttttcaatccccgtttttatcattttcctcatccatacaaggatactccatgcagggatctctgtccggcatcgcaacaaactccttatgatgtcccacatatttatatgcaggacggatgatcttgccagcgttaaggatttcttccagacggtgagcgctccatccgggaattcgggcaatggcaaaaataggtgtgaacagttccttggggatgcccagcatagtatatacaaaaccgctgtaaaaatccacattggcgcacacatttttaaacattttcctctgttccataacaagacggcttcccagtcgctccaccagctcataaagagcaaattcctccatcattcccttttcctcggcaagcttgcgggcaaattttttcagtatcacctcacggggatcggacagagtgtatactgcatgacccattccatagatcagaccggaatgatcaaaggcttctttattcaggatcctgcacagatatgcctctacttctgcctcatctgtccagtttttcacatgggctttgatatcggcaaacatatcctgcaccttcagatttgccccgccgtgtctcggacctttcagagagccgatagaagctgccactgaggaataggtatctgttcctgatgaagtaaccacatgggtggtaaacgtagagttgtttcctccgccatgctctgcatgaagcatcagagcaatgtccagaaccttggcttccagctctgtgtaagagctgtccggtctcagcatcagaaggatattttctgcaagagaaagccccttctgcggattccggataaataaagtctcatccttacggaaatggcggtatgagtgataggaataaactgcgatcagcggcagcttggcaatcagttcaatactctggcgcagaacattttctgcagaaatatcctccggtctggaatcataggtgtataaggtaagaatacatctctgcatggaattcataatgtccgcattggacgccttcatcacaacatcccgcacaaaccggcctgacagagtttcaaactgcgccatcacctctttaaacatttccagttccttttctgaaggaagctgtccgaaaagcagaagataaatggtttcctcaaatccaaatttatgtccttccagtccgtttaccagatcataaatattatagccctggtaatacagacttccctcagccgggatcttccttccatttacaaggtcataggcatttacatctgaaatttctgtaagtccggtaagaacgcctttacctgctgaatctctcagtcctctttttacatcatactcaatataaaggtttggatcgatccggtgattattcagaagtgtttcctgcaggctctccatactggtcttcaggcttcccatttcatccagattgatcatttcatgatctgacatttttattcctccgtttcctttccccgaaactcaattgttctgtctgaagcttaaagcattttttcttcccattctttttcacggaatcctgtcagaacaaaatctgttccgactacaagaggtcttttcaccaacattccgtctgtggcaagaagcttcagctgctcttcctctgacatatcctttaatttatccttcagattcatctgtttataaagatttccgcttgtattaaaaaattttttaaggggcattccgcttttttcataccattctttcagttcttcatatgttggatgttcttctaccattgctctttcctcaaagctgatgccatgtgcgtccagccatttaagagctttctgacaagtactgcattttctgtaaactaaaactttcactttgcatcctcctttatttctcagctttttcagctgtttcctgtaaaaacacatagtccggcagacatccggttcattctgtcagattctgtcaaacattttctgctttttccctttcacgttttatcatataaaagagctaaagaaaaatcaagtttttttgaaaattcctaatttattcttccaaaaatctctgtacccacatcctctttccatctgtacagactgacacagccccgcttttcatggtaaattctgtttttgcccctgattttttcagacggagtgttgtttccggtgagggatgcccgtaggtattggagtctgaacatgagatcactgcaacctctgccttcacctgatccagaaactcccggcaggaagaataacgggaaccatgatgccctacttttaaaaaatccacatctctcagcctgttcaggattgctttttccgcaggttctcctgcatctccggtaaaaagtccgcgaaaatctctgtactccagctctacaaccattccttcttcattcacatcttctcccagagcgtcttttgcaggagccagaatatgaaaaccggcttctcccatacgaaaactgtttccactttccacctgaagcaccttcattccggcactctgcgcaagatggatcagagtattgtatacttccggcggttcctcccagtcaggaagtatcagagcatcgcttcttacagaggtcaggccctgctccataaattcaagaagctccatgatcccactgatatgatccttatctgtatgggagatcataatcccgtttatatgagaaatccctctgcttttcagataaggcagaagttgatactgggctgtatttttcttgttgctgcttccgcagtccataaggaaaactcctccatccggaatttccagcacaatcccgtcaccctgtccgatatccagacaggtaattctgagctcctttccaggtttccgggaaaggacaaaaatccctgccgcagctgccagaagaaaaatccctgcaggatacaccctttttgcagctttcctgaacactcctctgattttgtccgagttctcggacacttttttcccaacagccaactgattttcttcttttttctgtatcccggatgccataacatatgccaggataattcctgatgccagcagcagatagtagctgatactctgccatatttccggaagccccccgatccaggtacaaaaaggcagctttccggcaaacatacagactttttcgtaaagccataaaagtattctgcccggaaccgctgccgccctccctgcattcacactgaaaagccccagcactgagcagcacaggccgcttataagaacacctcccacagtgggaagaacaaacagattcaaaaggattccgatcacagacacctctccgaaaaacaccagcataaccggaagcgttgcggcctgaacagaaagagaagaaatcagagctttccctgcttttccttttgcgcctgtaattctgatcagatgcggcgatactgcccccagccccacaactgctccgaaggataaaaggaaactgctgctgtaaagatatgcaggggaatcaagcagaagaaaaattgctgagagagccagtgcagtcataagatcataggttcgtcccagaactcttgctcctacatttaaaacaaacatacacactgctctcatggcagacacgcttcctcctgtaagcattccatattgaagcatcacacacaaagagacaagtcctgcccctgcgttccccagcccgattctttttaaaagggagaacagccccatccccagaatactgatatgcaggcctgatatagcaagaatatgaaccattcccgccatctgataccggagcttcagatcctgatccagctcacttttttctccaagaagcattgcctcaaaaaccggcgcatccctgcctgcagaaagcttcagtaccgtatgtatccggtccttcagctcaagcaaaaactgctgatatcctgaataagctctgctttttctttttatgattccatttttcataaaataataaatgtgctggcaggcataatactgcctggaatcaaattcaccgggatttctcggcgcttccacctgttccagcttcccggaaatacacacagccgtgcctgccggaagctcttcttctgtttttaaaaatactcttacattttcaatgggaattttttctgaccgacagatcagaacgacttgtttcagatagacagaaaaggaaaattccgttgcctggcatctctgtacctccccgcagatcacagagtccggatgcttttttatgtaggtctgcactgtttccggcaaaggagttccgcgtatcagcggaacccctgccagatcagccagacacatacacagcatcaggaacagacaaacaagacaaaccggacgtcttgtcatttgccttcctttccgtataaaatcatgtaaaaagatatgaatgacagttgtcaggattcctctttttcgtgaaccaccaactgatcatttttttcataaaatgtataaaggggcatactgcttctcagatttccgtccatacttccttctacagaaagctgaaccttatctgcctcacaggaatccagaagagaattcactacagaatagatctgaatgctttctgacacatccagtgcttcctcctgaaacgccctgttcatattgatataacagatccggtctgcaatggtagcgctgaggatcacggatttttccggaatcaccgcataatgcccttcctccatgggacccttggcaagctgttccagcaccactctttcttttggaagggtacgcctgtaataaatatttctctcctcttttaccagcttcttcccgcttttgtctgcgaaatacagggtaaaagtatcatacctgtaatcggtatccttgccggaaagctccaggaagctttcttctgtcatatccccgatcttattgttccgggaatccgtaagctccagcccctccacagtaaatcgaacacggtggatatccggcacctgcaaaaaggtttttacaatcccggctctggtaaggacttctctggctctgctcatttcatggtactgggcgctgaaatcaataaccagcacatcatcctgaaaatcataagaattaagtattacctcttccggaagcagtgcgatcccgtcctccggaaccttcctgtttccaatgctctgcatcagctcacggaccataaagtctgctgattcctcttttggttcatatgcttccctctccagagttgtctctgctgcattcagataataaaagctgtatttatccggcgtctgctgttcttctacttcaatactgcagccggcagccagcatacatacagaaacagccagaagaaggacacttaaaaatttcttcatccggcacctcctacggaatatatgacagcggaatacgaacggaaaacgttgttccctcgccttctctgctgaatactttgatcacgccatgatgcatggcaatggtacttcttgtaatggcaagtcccagtcccgtgcctccgatctctctggaatgtgatttgtccacacggtaaaatctctcaaagatacgctccagggaatcttccggaattcccatcccggaatctgccacagtcacataaaaatatttgtggtccgcgtctatggatactctgacccatccgtcgtccacattgtatttaatggcattttccaccagattactgatagcggaagtaaatttgatctcatccacatccgcctccaccggacggaagctgtcaaggatcaggtcaatgctccttttatccgcaataggtcttaaacgcttcaggatgtcctcaagaagctggttgatatccatgtgctgtatggaaagatccgctgtctttttatccatttttaccagactgagaagatctgtaataatccggttctctctgtcgatctcagcagtaatatcctgcagaaattcctgataaagctcctccggaactccctgctggcctaccagagaatctgccagaaccttcatggaggtcattggtgttttcagctcatgggacacattggaaacaaactcggacctggattcatccagaaccttcattcttgccagcatcttattaaaagcatctgtgatcagctctgtctccgtataatccggtacggagatctcatcattctgatatccgtccgtaagatcttcaatagacttggttacacgggcaagaggcttcaccagaacagtggcaagaatatatccaaggaaaacagacagaaccacgatcactgcgatcagaagaagtccctgataattcagttccatcatggtagccgtgatctcactgcaggagatcgtcatcagcatggctccctgaatctgaggaacatccgcacttctcacaggaactgcgaactcgatcacctgtccctttctctgataatccgtaggttcccctttcttaaagctgcggatgatctttggagaaaccagagttttcccctcatccacatgataggtatcctttacgatcttaaaatccctgtccacgatcaggatacgaccgccatacacattggacagcatttcaagcttgccgtttacagcctcggagctgggatcattgagataattttccttaatgatctgattgcaaagaatactgcactgattgctgactgcccctgcccttactgccacagcctgtttctcataattgccgatcatcatccgcgtaacgatcacactgggtacaattcccagaatcaccagaatgatcaggatccggaaacgcagactcttaaaaaacctgtttttctttttcatggcttatgcctgaaaataatagcctacaccccatttggtgtgtacatacttcggctcactgggattcgcctcgattttttcacggagacggcggatatgtacatccacagttctcacatcgcccggatattcatatccccagacaatattcagaaggttttcacggctgtaaaccttgttcggattaaatacaagcagctcaagcacatcaaattctttcgctgtcagattgatctccttgcctgcgataaacacacgacggctctcgcagtcaagcttcagatcacctgtctcaatggtcttggccttttccttctcctcgctttctgaacgggcgcggcgcatgatcgccttgattcttgcctttacctccagaatgttaaaaggcttggtaatgtaatcgtctgcgccgtattccagtcccaggatcttatccatatcctcgcctttggcagtaagcattacaatgggaacattggaaaactccctgatctgctggcagacttcaaggccgtccatcttgggaagcataagatcaagaaggataatgtcataatgcttttcctttgccttttccactgcttcctcaccatcgtaagcgcagtccacttccataccgtcctgttccagattgaaacggatgccctttacgatcagtttttcatcatctaccactaatactttcctgctcatttacaatctccttattctactgcaatcttgtcttttatctttgaaaaggtgctttccttgatccccggcacgttcatcagctcctccgtaccggaaaagccgcccttttcctcccggtaggccagaatggcctgggccttggcttcgccgataccgggcagtgtctgaagcgctgcagaatctgctgtgttcagatttactgttcctgagtcctgcgtttcccctgttcctgctgcttccgttacagctccgccggtacccggatctgcagcgcctcctgacggctgccctgccattcccttttccgcctcttcttttgtaggtacataaatctgctgtccgtcacttaacgcgcaggcctgattaatgcttgttcccgccgcatccggaagaaagcctccggctgcttcaatagcctgaaacactctgctgtcagacttcattgcgtatactcccggctgcacaacagctccgcacacatccacgtaaatttcctccggcggctgcgcgggcacagaagacggtttctccgtaacagcttcctctggggaagcaaggtccttctcctgctccttatcagctgtttcctcagcctgagctgacagttcctcctgttcctcttccagaagaagctccgtttccctatctgcgcagccgcacattcccggactgacaataaaaaggaaaaaaagaaacaggattctcagatttactgattttagatttattttctgtactctgatatcgggtcactccttatcttttccccgattctcatacctgaccataccctattttaacgaattcccggtgcttttacaataggtaagtactatttttgccatttaaagattatgatacctgcaatagccacagccattcccacaacctttctccactcaaacacagccttttccacaccgaaaagtccaaaaagctcgatcacataggccacaagaagctgggagacaacgatcagcatggctgcctttgccggtcccagggcacccatgctctgaatcacggtaactgtgataaaggctcctataactccgcccagcagcgtatatttattttccacctgccacaatgcagcgatactttctctgcctgtaaaaagccatgcaagcacacagacggcaaaggctgaaagctggacccagcctgtagatacccacaggctggtctgctttgtcacttctgtgttaaaaactccctgaatactcataagcgcgcctgaaacaagtgccacaataaatccccacatagtaatccctccatatgatccaacataaagatatgaaaaaaggccggtatttttaaccagccttttgttactatcatcatatacagaaattacttttttattcacagactttcctgcacgttttattttgtgtgattttcttttacctctgaactgcagcaatgtcctccgcagcttgagcagtcacagccgcactgaagagattttccggcttttttcgcccgaatcatacttctcagcaccagccctactgccagtataagaactgcaagtacaacaaatgttcccattaatatccctcctgacttctgtcagatttttcctgttcccacacagcctcctgagatcagcgtaccaataacgatatggggttctccctgatttaccatagatagcggcatcgttttttcacttctttctgtgtcttataatgccagtctctcatccgtgttaattatgtacagtcttattaaagttagtatatataaactattttcagctgtcacgctgtaaaaccttattttctgttcatgataaattcgttattcttttaataaaaaatggaaattccagctctcatattcctgtttggcttccggaagcggaaatcctgcatacatcagcgcgcctcctgtatattcttttccgtcacagacatagatttcgttttcctgaagccctctcagaagcactctggccggctggtcattggcgcgtaccctggaagccaccacgcttacaagagcctcttttttatccaaagcagcaaactcccaggcggaataatacctttctgtatccggagatgtgagacggaaataatctcctgtctgtatcagctcataatactctttaaaccttataatctgttccctgatctctgccttttcttctgaagtcagctttgcaggatcaagctcatatccaaaggttcctgccatggctactgtggcccgtgtactcagagggacagatcttcctgtctgatgatttgggcaggcggatacatgagctcccatcgtgctgaccgggtagcaaaaggaagttccgtactggatatccagacgttcaatggcatctgtgtcatcactgcaccagatctgaggagtataataaagcattcctgcgtcaaaacgtcctccgccgccgctgcagccttccatcagcatatccggatatcgttttccaagccgctccagaaactcatacagtcccagcacataacggtgcagtacctctccctgacggtctgcagaaagtgcggcagaatatacgtcacagatactgcggttaaaatcccatttcaggtaatccacttccgccctgtccagtacggcgctcatctgatcaaaaatatgatcccgcacctcctgtctggaaaaatcaagtaccagctggtttcttgatcttaccggcttccttccgggaacggtaaacgcccagtccggatgagcccggtaaagatcgctgtcctcagatacacactccggctcgtaccagataccgaatttcatgccaagaccatggatttttgcggaaagttcctgaagagtacagcccagttttttctcgttgacataccagtctcccagaccgctgttatcagaatctctttttccgaaccagccgtcatccattacaaacagctccacgcccatatcagccgcttcctctgccatatggaaaagcttttcccctgtaaaatcaaaataagttccttcccagttgttgatcagaaccggacgtctggcattcttaaattttccccggcacagatgatttctgatagctttatgataattatggctcattgcctcaaaaccgctgtcactgtacaccatagcggcctccggcgtccagaagctttgtcccggaagcagcttatagcagaaattccccgggtggattcccatcagaactcttgtctgatcaaactggtccttttctacctgagccagaaagcttccgctgtaaagaagagataccccaaagcagtttccctgagtttctgttgtatgaggagctgccagaaccacaaaaggattatactggtgactggaggttcctcttaaacttcccacagactgtatgccatgatgaacttgcgtacgggaaacctgtcgttccatttcatgttttccataaaacgtcatccagtcccagtttccgcaggtctgatccacacagcaggacagggctctttccagataaacctcctcttctcccaggttttccacacagactgcccttgtgatcaggtcaaattcctcaaacacaccataataaagctttaccagaatttccccgtcccggtctttcatggatatcacaagtgtgtccgcctgtgcgctgtcttctgcgtaaaatgccggtaaacccggaatctcatatttgcctttcagaatctcatacccctggaacctaagatcagaagcagaaactccatactggtttcttacagcaaaagcgctttccctgtagtcgccgtttccctgacaggaatattcctgaggcagcgtatccagtgaatattttctgtccgtttctgcatcataaggatttccggaaaatccgtgatccctcttctggatcagataggaaaaatccatctgctctgttctttttccatagtaggtatgaagcagtaccccatgttcatctgctttcatctggtacatgctgttttttgtgcaaagggtaaatactttttcattcactgctattgccataattgtttcctcactttatcccctgtggagatatactttctttatgatttcaattctgtttttatcatttcacttctatttcactgctccgtttaccacaccgttcagaatctgtttctgacagaacagataaaacagcagaatcgggatcagagccagcagataggatgcaaaggccaggttataatttgttccgaactgcgtctggaaattaagctgcgccagaggcagagtattcttgcctgtgccggacataattacaagaggcttcattacgtcattccaggttcccagggcagtcagtacggcaaccgttgcatgcatgggcttcatcaccggaaaaataatactccagtaagttttccaggttcccgctccgtccactcttgcagcctcttccagtgcaagaggaatatttttcagatatccggaatacagaagaagattcataggcatataaaataccacataaaggataattactccagccctgtttccgattcccatctgagatgtctgttttaccagaggcatcataagaatagcaaaaggaacaaacattccgctaacgatgtagagatatgcgaatttataaaatttactgtttcccatatttcttccaatggcatatcctgcaagagaatgtaccagaatggcaattattactgtcagcgctgtaatcagcagagaatttcccagagaattccagaagtcagtcactctcattgcctcagcaaaattgtcaaagctccaggaagaaggaaaggaaagcgctcccataatatcgtttgtcatttcagagggctttttaaaagcaatgatcacagccatataaagaggaaaaaagatcgtaaaacagcccatgatcagaagaattgttacaggccagtttgttttaccggtgtgcttgcatttttctttcattataactgctcctccttcttattcataaatgtcagctgaaatacagaaattgcaacaatgactacaaaaaatatcactgcattggcgctctggaatccaaactgtccaccgtccataccatttttgtagattaaaaatgagatggattctgtgctctgtgcagggccgccttttgtcaatgccatgatctgatcaaatgccatcaggaagtttttcatacagagaaccatattgatggtaaaaaacggcacgatcagcgggaaagtcaggtttttgaattttgtccatccggttgccccgtcaatggcccccgcctcatacacatcctccggcacagtctgaagaccggaaatataaatgatcgtattcattgcaattgcctgccatgcagccacgattacaatggcaaaccatgcgctctttgtatctgccagcatactgctgctgagaaaatcaattccaagagcttttcccacagctggaagaatataagtaaagataaagctgaaaatataacccactaccaggccgcccagaacattgggaataaaatagattcctctgagcgcactttttgcccgtatcttactgttcagccccagcgcaaggatcagactgaaaatatttacaataatagttgccacaatggcaaacttaaaggtaaacaaataggatttccctactcttacgtcctgaaaaagatcaatataatttctgagtcctacccagtcatagcttccataccctttaaagtttgtaaagctgtaaataaatcccttgatcagaggcagcgtattaaaaacaaaaaataatgccagaatcggaatggtaatcagcaaaaaagtacgttttctgtcatttcctttcatgatctacttcctccttccccgttttcctcctggtattcctgcaccttgcggatcagatcacggttgtatcgcttccagtcgctgtcaaattttttcagccaggcatctgtatcctgattcataagatatgtctgtatcattgcatccacagccatttccgccggatagtaatgatcctgataatctgtcatttttccctgttcaatatattccttcataccgtccagcatagaaggcagggtaaagtctccctctttgcacggcacagcattctgatcgtccagataaatctggatgttttcatcctccagcataaaacgcagaacctcataggcggcttctttgtctttgcagtcctccataacgcagaactgaaggtcaacacctgagttcaggatctgaccgtctgcgctgtcatttgccgggaacacaaaagaatcaatattcatatcaggatttactgatttaatctgaggtaccgcatagcttccgatacagtacatggcagactctcctcttgcaaaagctgtgcaggcgtcattatagctgtatgcataaggatcctcctgagcatagggaagaagctgaaggatcttttctgccagttcccggtattccactgagaaagtcgtctctcctctgtttacctgctggcacacatctgcgggagccagatcacaggccattgcattccagggcgccagacaggtccagacatccttaaatccaaaataaagcggctgctgtccggatgcctgaatggtatcaagaagttcaagaaactcattccaggtttcagggatctcccatccattttcttcaaacatatccttgttataaagaatacctgcggcatttgcggcataaggaactgcatatactccatcctttggaataaattccagatttttgtcaatgtccagatatgcctgcttgatatctgccagtccctcaaagtcagaaatatccatcagcatatccgcatccagaaaattggaataattaatatctcctccgattccgataatatccggctgatcctctttgataaatctggtcttcaaaacagtcatagcctcattgggagactctatgaccagctcaatatcatcatgagaggcattaaatttttcttccatcttctcaaaagcttttactgcctccggtttgtactggaccatttctatttttgtcttttcattgtccttttccgaagctccgcagccggacagcaccataccggaaccaagaattcctgccagggctgcccaggtaaacagttttacttttctcattacgtttcccctttcctctgtttttcgatccctttatattctgtacagtttatacggtttcttatgaatccattttatcattaccttatctttcggtaaatggaggcatgaatccatttttatatcataatgcgttttttcacgaatatagttgaagttactactcattcaggtatataatataaaaaaaccaagtttttttgtttaaaaataacataattatcattatttttttagcactattgcacatatacaaattaaaaaggaggaataaatatgcctattcccttgttccatgtgttttctgacgaccgctttatggatctgaccttataccagtatgggtatgaaaaatgccgtcctctccactcctttggtccttctgtcagaaatcactttctgttccattatattttttccggcaaaggcacacttcttgttgacgaaacaaaaacctcaacaaaagaatacaagcttcacggcggtatgggttttctcattgaaccggaacggatcaacacctatttcgccgacagagaagatccctgggaatatgcatgggtggaattcagcggactgaaggcaaaagagatcctggatactgcgggactttccacggaatcccctgtttttatccccacctcccatcagatttccgaaactctgaaaagtgaactgctccatctggcttccagtccctccgaaacctcgtcccttcatctgatcggacacctttatctgatcatggacgccctgcttacaggttccgcctccagacgcagagttcagaacggaaaacgatcccagttttatacggatgaagccattacctttatctctcagaattatgcgcttcccattaccatagaagatatggctcagagactgaatctggacagaagctacttcggcaaaatttttaaagaagtgatcggacaggctccacaggaattcctgatccactaccgtatgtccaaagccgcagaacttctgaaaacctcagatatgccggtgaaaaacatcagtgttcaggtaggctatcccaatcagcttcacttttcccgggctttcaaaaatgtatatggacagtctcccagagaataccgacagaaaaaccggatcattcatgaatagctgttcagaatcctggagtatttatgccaaaacgcctggccggacagtgctgtatgatcagtagcaataacccttaattccaaataaaatcagtaagaaaaatatttacaagtagttttgaaaactatataatagaatgcagaggtgataaactatgacgatcaatacacaggatatgataggcagtatactggaaagtatttcaagaattgattatattaaaccggaagatattccgaacattaatttatacatggatcaggtcactacttttatggaggaacagcttgcctcctccaagcgttatccggaagataagatcctgacaaaaaccatgatcaataattatgccaaaaataatctgctcccgtccccggaaaagaaacgttattccagggagcatcttcttctgcttatttttatttattattttaaaaacattctttccattaatgacatccagacgcttctggggcctatcacagaaaaatatttccgttcagattcagacatggatctgacttccatctacaacgaggtgttcagcatggaaaaggaccaggtagagcttctgaaagaagatctggtaaaacgctaccataccgctgaagctacttttgaatcagcgcctgaagaagaccgcagatttctgaagcttttttcctttatctgtcttctgagctttgatgtgtacacaaaaaaaatgctcatcgagcagcttgtagatgaactgcgggatgagaacaatgaagaatttaccaaaagcaaaaaatcgaaaaaataacattgcttctgatcaccggtgatataaaaggggactttttcaagccccctttttgcatttcgctttacatttcagcgaagttcttttttatcagtaaagataatctttatttacatatccgctttttccaagctttggagaatatacataccagtaggttgaatcactggtatccgttacctgtaccgtatcgccggtatataattccccgatctcattggctgcgtcataggctttggcgcttctcaaagcaagatatcccttacttacgctgactgtttttgtaacagttcctgaggaagaagaacctcctgtcagataattcttgtttacaaatccgtttttgccaagcttcggagaatatacataccagtaggtagcgtcgctggtgtcgatcagctgtactgtatctcctgtatacagttccccaatctcattggatgaatcataggctttggcatttctcagagcaagatagcccttgcttacgctgactgttcttgtttctcctgaagtgccggaagaggtgccctgaagataatttttgtttacatatccgcccttgccaagtccgggagcatataccagccagtaagtgtcatcatttgtgttggcgatctgtacggtatctccggtatacagcttgcccacctcatttttgctgtcataggccttgtcgtttctcagggcaagataaccgctgtctacctttactgttctggagcctgctgaatttgccagatacgctctgttcacatatcctgtttttccatgctttggagaataaacagtccagtaagtagacccacttgaatccgttacatccaccgtatccccggtatacagctctccgatctcattggatgaatcgtaggcttttgcatttctcagagcaaggtatcctgaagcaactgttactgtgtaattatttgccgcaaatccggtctctgctgttacaggcagagacagcacaaatgccactgcaaatagcgccgcccatttcaaaagggcaattcctgaaaactctttccatttcctactcatatcgttgtcctccttttagaatattatgtgaatcagctcctttgctgtttcaatccctgtaaacgacgtcccttctgctgcctttcctactgctgataatagtcgtaaatctgccggctcagcgccgctatggtgctctgggcagagcctgcttctgaaagctgctctgacataaatacaagaatcagatcattttgtgtattgtaaataattcccgcatcgttttccacatctgcaagctcccctgttttatttgccacactgacgcctgcaggcatccgggccggaatcttgttccttctctcctggcctgccagaagattaaactgtgccgctgccctgggatctcctgccttccagccgtcataaacctttttaagaaaatgtccgcagtctgcaggagacgtataattatcatccagttcattgctgtgcagcaaaagccttcccatgtgcgtattgctgtatccgtttacactgcagtattcattgacaacattcattcccacagcagcgtctccgcctcccagatatccggtaagagtatttgccgcatcattgtcgctgacagtaatcatggaacggagattgctgtccacgtttccctgaccgtactgcgctgccagattatcataattctcataagcagctcccataatataaagcttgatgagactggctgcctgcattctgtgttcattgacacttccctctgtgtttgctgaaatattacatacatatgcggaccagcttccgttatttgtgggaaacgccagactggaaagcagtccggaaagcgattcatctgttactgcccctgaggattgagttcccccgaacacacttcctgatgaagcatctgacggaggtgaaagcgctccgtcccctgtgccattctgtatctcctcctcaggcggcggctccggatgatgatccggatctccctgtggttctggattttccggttcctctgcctcgggctgaggcccctgcatttctcccggagtaatttccggctgtgtctcttcctgttcctctgcaggcgcctctgccacctcctgtacttcctcttctgtctgctgcgccttgtctgtcccgcaggaagactgagccgagattaccaggaacgccagagccagtaatcctgccttttttgcgttcatgtaactttttcattccttcccctgcaatccaccttttcctgtgtgcaatttgcatattttattccgtgttttttgcagttttttcatgtattgttattataattttaatctaaaagtcttgcaagtatttttttcttttcaaattgtttattatagcttatcatataggaaacaggattctgtaaaatccatgttcagcaaatgcttttcaatttttatatcacataaatcattattttcaggaggattcatatgaaaaaaatactgaaatttctttccgccggatttcttatactgaccttcccggttactgccctgggcgcttcctacgaaagcgaggaaggccaggccatgatagggcccccctcttcccagacagaggacggctccgaagccttctctgattcccccgctgagggaaccccctccggcatcgactgggacgccgccaataccgctgcgtctccggcctcaggaagcggtgattttactgtggtgatcgaccccggacatcaggggccttctgttgatatgagcgccccggagcctatggctcccggttccagtgaaaccaaggcaaaggcaacctccggcacacagggaaacttctccggcgttccggaatatgaggtcaacctgcaggtttcccttcttttacagcaggagcttactgacaggggctatcgagttgttatgacaagaaccgataatgaaaccgctatcagcaacaaagaacgtgcggagctggcttctcagcaaaatgctgacattacagtgcgtattcatgcaaacagcgcaggagacagctctgcttccggagccctgaccatggctcccacttctgccaaccagtatctttcctcagatatcatagaaaaaagcaacactcttgcttcctgtatcatcaaccactactgcgctgccacagggcttggaaatcagggtattatatcgtctgacaatatgacaggaaccaactggagcactgtccctgttgcaattcttgaaatgggatttatgagcaatcagaatgatgacctttatattaccaatactgccaaccatccggcaatggttgccgggattgcagacggaattgacgaatatttcagtattgtagaaccgcagacagcagccaaaggccagcatctcagtcagcttacggaaagccttcagactcagtatacttctcctttggaaaaatcaggtgaaaactgggcaattgctgttatggaccctgctactgacgattacagcaccatccatgcagaagagaccatgcaggctgccggtctgatccggtcctatatcatgggcgccgtatatgaaaagctggtttatcctgatccggcctcagaggcatccgtcgattatcagaaaaccctgaagccccttctccaaaagatgatcgcatccaatgacagcaacgctgccaatgaacttgttgcccttctgggaaacggagattttaaatcaggcgctgctgctgtaaaccagttctgccaggatcatggatttacatccaccagactggaagcgccacttaccgcagacagctcagaaaaaaccaataccaccagcgcctcagactgctgccgccttctttctgaaatctataatcagacattagtaaacagcagtgcttcctcagaaatgctgtcccttctgaagcagcaggcagaaaaggataagattctctcaggtttgccggctgaaacagaaactgccggtacagaaggcactcagtcagattctgttgaaaacaatatggcagttgtactggacagcgccagcccctatgtattctgtgttttgtccaataatataaaaaattcctcagaagccaaagaaaatacaaaaaagatttctgcggacatataccagtatatgacctctgagtccaaatctccggacactccttcataagaaaaaagcagagatgcggtaaagcccgtattctctgctctttttaatctgagtattattctgttttttcggaattttctttctgagcttccttttctctcattctggaaaaaaccatttcgtagccgtcatttccgtaattcagagaacgatttacacggctgatagtggcagtggatgcacctgttttttctgagatatccagatatgtccgtttatccgtcagcatttttgctacctcaaaacgctgtgacaaagaaagaagttcattaatcgtacatacatcctcaaaaaacgtataacattcttctttatcttttaaacaaagaatcgcttcaaataggtgatctacctcttctgttctgatttttttacccatattctctgctcctttaaatcactgtcctattactgcataacacattttaacactttagcacgtgataggcaagtgctttttgccggaaaaacagataacatacagagaaaatacaggtatcctcaaatggcacaaaatggagtataataaaggggatacaaggaaataaaactgaaaacggaggtttttatgaaatacgcatctgttcttgatcttcatacacatacagttgccagcggacatgcctactgcaccattcacgaaatggctgccgctgctgccggaaaaggccttgaaattctcggaattacagagcatgcgcctgccatgcccggtacctgccataacttttactttcataacctgaaggttgtccccagagagctgcacggcatccggctgcttttgggtactgagcttaatattcttgattcagacggacaggtagatctgggggaaaaagaactcagaaatatggacgtggtgatcgccagccttcatcttccctgcatgaaaccgggttcacgcgctgaaaacacagaagcatacctgaatgttatgaaaaatccctatgtaaacattatcggccacccggatgacggacgctatgaaattgattatcctgcacttgttcagggagccagagaatacggcaaggttctggagctgaataaccattctctggagccatcctgctttcgccagggcgcaaaagaaaatgatacggaaatgctgaaattgtgcatgaaatatcaggtgcctgttgttatgagcagcgacgctcattttgacagcgccatcaatgagtttgaaagcgcgcgcagccttcttgaagagcttgatttcccggaagaactggttttaaaccgctctgcagaagccctgaaaccctttgtaaaccgtaaattttaaaaatatttctgacattcccagggataacagtaataacacaaaaccagatttatactttcaaaatggagtgattattatggatttatttgaatatgcaaaatcaaaaactctggacagagaatctcctcttgcttcccgcctccgccccacttctctggaagaggttgtaggccaggaacatattgtaggaaaagacaagctgctgtaccgcgctatcaaggctgataaactgacctctgttatcttttacggacctcccggaacaggcaaaacaacactggcaaaagtaatagccaatactaccagcgctaattttactcagatcaatgcaactgtagcaggaaaaaaagatatggaagccgttgtaaaggaagcccaggataatctggggatgtacggcaaaaagacgattctttttattgatgagatccatcgctttaacaaaggacagcaggattatcttcttccttttgtagaggacggaacaatcatcctgatcggcgcaactacagaaaacccttattttgaagtcaacagcgctcttttgtcccgatccattatctttgaactgaaagctctgagcaatgaggatattcagactttgatcctccgggctgtgaacgactgtgacaggggcatgggaaattatggcgctgtcattgatcaggatgctgtggaatttctggcagatatggcaggcggcgatgcaagaagcgcgctgaatgcagtagagcttggaatccttaccacaccaaaaagccaggacggcctcatccatctgactcttgacgttgcttcagagtgcatccagaaacgagtgattcagtatgacaaaaaaggcgacaatcactatgatattatttctgcctttataaaaagtatgcgcggctccgacccggatgcagctgtatactatctggctaaaatgctctatgcaggggaggacgtcaaatttattgcccgaagaatcatgatactggcatccgaggatattggaaacgctgatcctcaggcaatctgtgtagctgccgctgccgcacaggctgttgagcgggtaggtatgccggaatctcagattattctctcccaggctgttgcctatatggcctgcgccccaaaaagcaactctgcagtaaacgcaatcgctgctgccatggactctgtaaaaaaaacacggactactgtgccggttcatcttcaggacgcccactacggcggccacgaaaagcttggcaaaggaatcggttatcagtatgcccacaattacccggatcactatgtcagacagcagtaccttccttctgaaatacagaatgaacatttttacgagttaagtgatatgggatatgaaaaaaccttaaaagaacacatgaaaaaaatcggagctctttaatgagccccgattttgccagttattataagttcttccatatgaaataaaaagctgataatccagctctcagttattacaggcacaaacagcaaccagctcttctgctttctgggcaaccgcctctgcattagaaagagttaatgttccctgaattaatttccaaattttctatagcataaaattattcattattgtcagtatcctctccgtcttcttcctcaaccaatgcaggagccgcctctatgatagatgtaagaagattatgaaaatcagaggctttcatactggtaacaaccggaatacctgtttgttcttctaaagcctttctcgcaattccagctacttcacctcctctacgagccactctgcggttttcctcaaagcctgctggatgaacagctacggaaatatcttttgtagaagtttccgcaagcatatttaagacaagttctgtagtactcatgttgtcacgaagattttctttcttcaaacctttcagagatttatattgtctggtagacattcctgcccaagcctttgtaatctcatccgttagaatggcatattctttaccttcctgtacgccgcgcttgtgccattcatctgtaagttctttgcgaacacggatagtcagaagcctttgatttatccaatcttcatcatatccctttttcaaatatgtagtaaaagcccgatcaatggctttctctggatcaatggtctcctcaatgcgatcactgccaactctcgccaaccatgcttttaatggctctgctttttttgatggaacagattgaataattctcaatacaccttccatttttgcagcttggatttttctcatttttccatctactgtcggcatagcaaccagggtacaaattgtaccccacttcaaattaagttcagggtcgcgagcacgcatcttttttatatattgcttcggatcagcactatctgtcaatacggcaacaatatctacaacagaaaaataccattcttcctgttcagcattccatgcagtacgaatttgtttatcttcaaatgcttttgtggtaattttctgatctaccatactcaaaacctcctcacatatctccacaaacgttaattcaatcagtccttaccctatatatttttcttatactattaatcttaatttctctgataatgaattctttgtcgtattaatatttctgttgtgtttaactcaacaaatcacaacatatgaaatttcctttattatgttgtcatttaaaaatttgttttataatttcatatttagtcttaaacttcggataacctaaaaagttttatgctataagtatagcataaaccactatttttagctaccttaggtcaccatctaaagtcaatgaaattgcggtagacgttactatgaactccgttaaaacatgtattactggatgcatgaaaaaaatcggagctctttaatgagccccgattttttgagatggaattatttattttttctttcttctaagcatctggataagaccaatcatagaaccacttccaagtaagcctgctactaacggtacagtatttgttgcatcgccagtcttaggattgtttgttttaacctcagacttatttgtatcagctttattctgatcgttgttctggttattgttgttgtttggtttctccggagctacagttggtttattctgatctggagtaggagtcggattttccggatcaattggctgatctgggtcttccggattaggagtaggagtcggctcttctgggtctggagtaggagtcggctcttccggatctggggtcggagtcggctcttccggatcttctttctctgcacggactgtaactaccactgtgttatcctcaattggaagatctccaatgattgcaattacataaccttccggtacatctgtaagaatacttgtgttgatgtatgtatctttttcatctacaacaagtgtacctgtacctacttcttcaccttcttctgtcacatatttaactgtaacatcttttgtatattttttctgtcttactactacgtttgcagaatttgtttcaaagtctaccgggatatctcctacaactgcaatttcccaaccatatggtacatctgtaaggatgcttgtgttgaagtatgttgcgttctcatcaagtttgattccagatgtcagaatattatttccttcctcatctacataattgattacaacgtctctctggtatactttctctcttactactactgttgctgagtttgtctcaaagtctaccggaacatctcctacatttgcaatttcccaaccgtatggtacatctgtaaggatgcttgtgttgaagtatgttgcgttctcatcaagtttgattccagatgtaaggatgttgtttccttcctcatctacataattgattacaacgtctctctggtatactttctctcttactactactgttgctgagtttgtctcaaagtctaccggaacatctcctacatttgcaagctcccaaccgtatggtacatctttcaggatacttgtgttaaaatatgtcgcgttctcatcaagtttgattccagatgtaaggatgttgtttccttcctcatctacatagttgattacaacatctcttgtgtactgtttttgtcttactactactgtagctgtaccatcttcatttaaagagatatcacctacatttgcaagtatccaaccatatggcacgtcttttagaatacttgtgttgaaatatgtttcatctttgaggagtttaatgcttgttgtaagtactggatttccagcttcatctacatagtttacaacaacgtcttttgtatattctttttcccttactactactgttgcaacattgttgtcacctactggcacatcacctgcatttgcaatttcccaaccatacggtacatctttcagaatgcttgtgttgaaatatgtttcatctttgaggagtttaatgcttgttgtaagtactggatttccagcttcatctacatagtttacaacaacatcttttgtgtattctttttctcttactaccacataagctacattaccttccactggtacgtcacctaatgtagcaagttcccaaccatatggtacatctttcagaatacttgtgttgaaatatgtttcatctttgaggagtttaatgcttgttgtaagtactggatttccagcttcatctacatagtttacaacaacatcttttgtgtattctttttctcttactactacagttactgcaccatctttgataggcatgtcgcccgcctctgcaacttcccatccatatgggatattcaaatcccctgtgttgatatattcagtacctttgtaaactttaatactttcggaaagtactaaatttccgtcttcatctacataatttacaaaaacactctgattgtaatctttctctcttacaacgatgttaacagagttgccaccttcattaaggttgatatcacctgtgctggcaagttcatagccatatggcacatctttcagcgcgcttgtattgatgtgatttgcaccagcttcaactactgcatttcctgttcctacattgctgccgtcttccagaatgtagttaaccatgatagtcttttctttaagtcttaccagaacatcaacagaatcagaatctggtactaatgcaacatcacctgtagcagcaagtgcgtatttttctggcacattcttcaacagacttgcattgaaattaccggcattttgcggaacttctactgtttcagttccaataatatttccactttcatcaacataattaacattaatagatcttgtctctgctgctttctctcttacatatactgtaatagtagtttcgctagctgaaccactgatatctcccgactcacaaagctcatagcctcccggaacctgagtcaaatcacttgctttgaaagcaaaacaatcgtacttatttactcctgcacttactgtttctgtaccaacaacgtcgtcagttccttcaagcgtgtattgtattgtaacatctacagaatatgttggttcttcctgtttttctgtatcttctgttgtttcctcttctgccacttcttcgccagtctcttctgttgtttcttcttctgccacttcttcgctggtctcttctgttactgcttcttctccttcaacaggtgtgagaacctcatcttctgctgcgttttcaacaacaacatcagtagtagttgcatccatagatgcagctgttacgcctactgtgcttgtgagaactacagaggagctgaggccaaccatgagaagttttcttactactttgtttttcatagcttctttttcctccatctctgattttagggatttctcctaatcctatgtatcgttcttattatacccccccctgtattattaagtcaacccaaatcctcctatttttacctgtttttcaatattttaacacccaatatctttacagattccaacagctttttcctgtaaacggcaaacaaaaaaagacactgtcttcaattattgacagtgtccataaattatcagatttttcagatcaattcacccatgatggttgtataaatatcctggcatttctgaggccagcttttgcatatggcccgcgcagccgctttatttggcgctgccattgtcagatccatgatcgctgtatctttttcgatcagctggcatctgactgcataggttccctgaggggttgtataataatcagccggcgtaagaatcctttccggcatttcatatccataatccttcaaaaattcttcgatttcatttctgatatcctgagagagatcattttcaaagtaggagagtgtcttacttccctcatctgtcagctcgtaatgagaactgttggaaacggttctccgtctcagaagtcctgtctccaccagctctgacagcacctgctgaagatgaaaataatccgtataatccctgtccagcacaaattctgatatctgagaatttgtcagctccttcctggaatgctgggccatataaagtaccatcagtttataaattgtaaatggttctgccattctaccacctctttctcatttacatccggaacatgtctgttccttctgttctttcacaatcagaaactttcaaactttttccctggtaactgttctgttctttcatctgatggtgaagcagattcagaacctcccgttttctcgatgcccacaaaggagcgatcagaagatcttttggcccgtctcctgtaatcctgtggatgacgatttccggatcaagattttccagacattcaatcagtaaatccagatattcttctctctcataaacctgaaatcttcctgcaagataatcatatgccaggtctgtccctttcagaacatgaagaagctgaagtttgatcccctggatatcttttttattcaaatatctcattgtctcaagaatctcttccctgctctctcccggaagccccagaatcgtatgaacgatcacctcaatattccgtttgcggagattttccacagcctgatcgaagcaggaaagccgatatccccttctgatgtactgagctgttttttcatggatcgtctgaagccccagctcgatccataccggcttgatccggttcagctcttccagaagatccagtacctcctctcccagacagtccggtctggttcctacagacagagctacgatcctgggatgagacattgcctctttaaaaatcttcctcaggtattccaccggcgcataggtgtttgtatacgcctgaaaatacgcaatatatttttgaataggccgcttgccggaaagaagcgcgatctgactttcaatctgctctgtaacagacagcgatacgtctgccgcaaaatctccgcttcctccctcgctgcagaaaatacagcctcttgtcccaagagttccgtccctgtttggacaggacatccccccgtttaaggttactttatatactttttcaccaaaacgctccctgagcatatagtccagggagcaataaggttttccgttccagctcttacgctgttcccggcattctttattcagttcattcatcagaacattacctctgtttcttccgaaacactctcctcaggaatatacttgtcaaaaattctcacaaaaaagtgtgaattcccatatgcaattactgccggtccaaacagaatcaccagcataatcagcgacatctgtatctgaaatgacggaataaataaaatcaggatcggacaggcacagatcagcagcatcaaaattgtatacggcaaatgacggattgccattaaaattgcattcttaaaagtattttttacagaattataaaactttgcaagaagcggatacacgtataaaagaatcatcacatacaaaagggtaaatgccgcaaaaatcattcccagaatctttcctgcgggctgccccatctttcctgcaatattggtatctatataaagaagagctgcggctgcaagcatgattatatttataacagtcgcctgcttaaagttctgcttaaaagaccggaaaaagcttctgaatatatatgcctcttcatttcttaccatcttcattgtcacataatacaaagccgtcagagatgctcctgccgtaacaatcggtatacaacagataatacagagaagattcagcatgcagagatctgcaattttccccataaatacaaaaaacttgttatccatattaaaaaaacgacccatatcttactgctcctttgttcttaaatgtgaatcattgtctaacagtataacgaaaaaagacagaaaaagcaagcttcacggaagaatcagacggtcaactgtcacaaattcccatccctgctctgtaaactcgtcaaccagagcaagcgcagcctccacagttgtttcgtactcgtcgtgcatcagaataacagaaccgttttttatatttttacgggctctttgaagcacatcctgtacattttgggttttccagtccagagtgtctatggtccagaatacaggaatcatctctacacaaaactctgtgtcctttttccaggcgccatagggagggcgcatgtatacaggatactctcctgtaatctcataaattctgttgtttgttttcagtatttcctccctggctctggtctctgaaattttgtcaagctgtacgtgattataggtatgatttccgatcagatgtccttctctgtgcattctttttacaatatgctcatttccctctattgattttcccagaagaaaaaaggatgctttgattccccgctcctttaatccgtccagaagcttttctgtatatttctcatcaggtccgtcatcaaaggtcagggcaatctgaggtctgtcctgatcttcccttacaagtctctgcattccttctcctgcaattatttttgcggcagaaatacctgcttcctgaattatagcattatcggtccggctgagaactgtaaacgccgcaaacagaattcctgcgcaaatcatacaactttcagactttcttttcctttttttcaattgctgccgctcctgttctcttgcttccataaaagattctatgcaggacaaagcagcatccatgactgtacagacaacgtttgaaagataattttcctgtaaattggggaaaagaaaaagaaaaaacaagagctgatttctgtctttatacaaaaatcagctcctgctgaatgctcagtcacaactctatgttctgctttttcataagtcttttcaaaaaggattccgaaatctatcctatttattaagcatgatctttaactgtgcttcaatagcctccgcgcatctttcaaacccaagcttcccgctgttcagacaaagatcatagttggtggcatcattccacactccgcctgtaaacttacggtaatactcctgttttctcttgtcatcttttaaaaggaatttctcaatttcttccctggaaccggaaatcttttcggatgcctgttccacgcggaaatcccagggcgcgtgtacaaacacacgcagggtattgggacggtccttcagcacatagtttacacagcgccctacgatcacataggattctttttctgcaagatctttcacaaccttcgcctgatagctgaaaatattttcatcagaaataaattccttactgtccggctgaaccagctttcccctgtaaagtgaggacttattaaacagggatggctttattttgtttccgccctcaacctttccaaaaagtcccagatcgatcccgctttcatcagaagccatccggatgatctctttgtcatagaatgaaattcccagcttttctgcaagcatctttcctacggtacgtccgccgcttccatactgtcttgcaattgaaattactatatgctcatccattcttattcctccttgcaacattcccacagctttcaaagctgttttattctcccagataagccttctgtactgcctcgttgtgaagcaggtcgtccgcctttccttccagagtaatacttcctgtttccagtacataagctctgtctgcaatggaaagagctttttttgcattctgttctaccagaagaactgtagttccactttcgcttacttctttgataatatcaaagatctcatttacaaaaatcggtgacagtcccatagacggctcatccatcagaatgatccttggtttgctcataagagcccgtcccatggccagcatctgctgctctcctcctgataaggttccggaacgctgtccctgacgctctttcagacgtggaaatcttttgtacaccatttcaaggctctgcgcgatctcgtttttatctttgcgggtatacgcgcccataagaagattctcataaacagtcatatccgcaaatactcgtcttccctccggaacatgagccattcccatttgtacgatcttatgcgccggaactttcagaagatccgttccctcaaacataatgcttcctgctttggccggaagaattcctgtcagtgtctgaagggttgtagtctttcctgcaccattggcgccgatcagagcaattacctccccctgatttacctcaaaagaaattcccttcagagcctggatcaccccataataaacctgaagatcctttacttccaacattgccatgattatgttcctcctattctcccagatatgccgtaataacagtcggatcattcagtacctctgaggtctcaccctcagtgagtacctgtccgaaattcagcacggtcagcttttcacagatgccgcccaccagcttcatatcatgctcgatgagaagggtagtcatatggaaatgttcctgtacaaaacgaatggtatccatcagctcctgagtctcattggggttcattccggctgccggttcatccagaagcagaagctttgggtccgtagcaagagcgcgggcaatctccagcttacgctgtttaccataaggaaggtttcctgcaaggatctcagcctctttgtccagatcaaacaccttcagaatctccattgccttttcgttcatttctttttctactttgaaatacttcggcagtctcaggattcctgtgagagtagaatactgataatggttgtgaagtccaacttttacattatccagaactgacatctctttaaacagacggatattctggaaggtacgggcaattccggccttgttaatctctattgtacttttccctgtaatatcctgtccatccagtctgataattccctcagttggcttgtatacacctgtcaaaaggttaaaaactgttgtttttccggctccgtttggaccaatcagtccataaagctggcctttttctatattgatatgaaaaccgtcgactgcacgaagaccgccaaactgaattgacaaatgatttacttccagcattgccataatcaagctgcctcctttttcgtttttccgccccggattttttctgctatacggcttctccatgttcttgctgccggagcccagttaaagagcatcataacaatcagaacaatggcatagatcagcatacggtaatttgcaaaaccgcggagaagctctggaagagcgtaaaggataatcgccgcgatcatggaaccacggagatttccaataccgcccagaaccacatataccaggatcagaattgacatattgtaatcaaatactgataccttgagcatggaaatattatgggcataaagcacgcctgccacacctgcaagggctgcagaaaccgtaaacgccagaagcttatattttgtcacattgattcccactgactctgccgcaatacggttgtctcttgtagacataactgcacggccgcttctggaatgaaccaggttctgtacaataaacagagtaagcagaacaaggagtactccgatcaggaaaaaatatggcttgatctctttataaagagtggctgttccggaaatacccagagcgcctttcataatctttttgccgcctgccgcaagctcaagacctgaggaagttgttgctgcgtgaataccgtttttatctgcgccaacatagagaatattgataagattcttgataatttctccaaaagcaagggtgacaatcgcaagataatcgcctcggagtctcagtaccggaataccgatcagaataccgaacacgcctgccactgccgcgccgatcagtatcgccagaataaatctcggaaccggaggaagagcgtctgctgccagatgcgaaaagagagcgctggaatatgcgcccacgcacataaagcctgcatggcccagactcagctcgccggaaaatccaactacaaggttcagagaaatggctgcgatcgtataaacgcacagaggaaccagaagacctgtcagaagtctggaaagatttcctgtggaggaaagaatctggactaccgcaaacagaacgatcacaattccataagttataaaattacttcttgttgtcttattcatattttttttcatatcggccaccttacactttctcctgaatgtttttaccaaacagtccggtaggtttcacaaggagcacgacaatcagtactgcaaatacaatcgcgtccgcaacctgggatgaaatgtaggcttttccgaaaatctcaatgattcccagaaggataccgcccaccatggctcccgggattgaaccgataccgccgaaaactgcagccacaaaggctttgattccaggcattgcacctgtgtacggagtcagtgtgggataagcggaacagagaagaaggcctgcaatagcagcaagtcctgaaccaatggcaaaggtcagggaaattgttgcatttacattcacacccattaactgagcggcatctctgtcctcagacacagcctgcatggcgcgtccgggtttggttttacgtacaaaccaggtcagagccaccataataacaacgctgacaacaatagttacaatggtaattcccttaataacaagctgtccgccaaacaacgttactgacggaacatcaatcacagtgacaaaactcttggcatctgctccaaagatcagaagtgccagattctgcagaagataactaacgccaatggcagtgatcagaactgccagattggaggacgcctttctgagaggacgatatgcaaccttttcgatcacaacccccaataccgtacacaccacaacagaaagtatcactgccggaaccggacccattcctcctctggtgactgcggtgagaatcacaaaagcgccgaccatgattacgtcaccatgggcaaagttcagcatcttcgcaattccatacaccattgtgtagcccagcgcaatgatcgcatagatacttcccaggctgattccatcttttaaataagatataaaactcatagtgcacctcatatagaaattttattgttgcataaaaagaaacagaggacagtccttatgcacaggcaccatcccccgtcccttaaattttcagtgtatatttattcactgatcattccatttctttgtattctccgttttcgattacaaaggcctttggctctttgtcgcactcgccatcttctgtccatgtagcttttccggtaagtccgtccagttctacctcaagcatagcctcagacattgccgcgctgatatcctcatttgccatatcgggtgtgatctctgctgcgtctgctgctgctttcattgcatagatcacatcataagtatctgctgcgaactggttaggagtctcgccgttattagcatcgccgtaagcctttacaaacgcctggcttgcctcatcctctgcagttgcagagaaaggagtcagaagcataacgccctctgcaagagaagtatcaaagttctcaacgccaaggattccgtccatgccgtcaacgccgaagaatttaatatccatgcctgcttcagatgcctgctgaagaatcagggcattgtctgaatagtagtttggaaggaaaagaagctctgcaccgctgtcggcaatctttttcagctgtacggaatagtctgtattgttatctgttgtgtacgcctcgtcagctacaacctccagaccgttttcttctgccgcttccacaaaggaatcatgtacgccggagttatagtctgccatggagtcataaagaacagcaacctttgttgcaagtccatgctcaccgatatactgtgcggattttgctccctgagccggatctgtaaagcacatacggaattcattgcttcctgctgtaatagaatcaatagctgttgcagacggtgtaaacaggaaagtgctctctgccgcctctgctcctactgcaatacaggaaccggaagtcactgccccacaaagcatctgcattcccttgtcaagaagatcgttataagcatttaccgccttctccggatcgcccatatcatcgcctgcatcaagtacctcgacctggtatccgttaaatccgccgtcttcgttgatctcgtctactgcaattttagctgcattgtatacgtttgtgccatactgtgcataatcgcctgtcatcggtccgatcacaccgattttaaaggattcgtcaccttctgcaaatactgctgtgggcattgctgctgttgctgccacagctgctgccgcagttacacttaatacctttttccagtttctcataacaattctcctccttaaatttgtaacgattatcagaatcctgttcctatgtgaacagataaggttaaaaaagcccactggatcaccagccggctttggcttcccctctgactttcgctcgctaatactttaatgttttgattatagcatctgatatatttgatttcaagtataaatttataaaatatttatatttaaaaaaccggtatcctatacagaataccggttccggaaggagatatctctcctgtaattcattatttacttatgcgatcgcttttttagcaatctctgcaagtgctttgaagccttctgcatcgtttactgcaagctcagcaagcatctttctgttgatgtcgatgtttgcaactttcagtccgtgcatcatcttgctgtaggaaagtccgttcattcttgcagcagcgttgatacgtgcgatccagagctgtctgaactgacgttttttctgctttcttcctgcgtaggagcttgcaagagctctcattacagactgttttgcaattctatactgtttggaacgggctcctctgtaaccctttgccagctttaatgtacgattatgttttttctttgcgtttaatccgcctttaattcttgccatttcttaatttcctcctgttcgtcttctcttcttacttcttataaataaggcagtgctttcttgatattcttcaggtttgtggaatcaacaacagtggcctttctgagatttctctttcttttctgagatttctttgttaagatatggctcttataagctttgtttctcatgatctttccggtaccagtttttttgaagcgttttgctgctgctctacatgttttaatcttaggcatttttatttcctccttgattcgtggttctgttttatatttcacattactgctgtgtccgtaaccggacacggaaacagtaattgcttaacgtttttcgctgagaaacattgtcatgcttcttccctcgatcttgggagctttttccactacagcgatatctttcagaagctccgcaaaatcatccagcacgtgtctgctgcttgccatatgagccatttctcttccacggaaacgcagagtgacttttacgcggtcaccttttgtaaggaatttccttgcagcgtttacctttgtctttaagtcattcgtatcaatattaggagagagacgtacctctttaatgtcaatcgttttctgtttctttttggcttctttttccttacgggaaagttcgtaacggtattttccgtaatcaatgatcttacataccggcggctttgcctgcggtgcgatctttacaaggtcaagtcctgcctcctgcgccttaaacatggcctcttttgcagatatgataccaagctgggctccgtctgctccgatcagacgtacttctttgtctctgatttgttcgttaatcattaaattgctaattgttgtacacctccatacctgtaaatgatataccctgacttttgcacgtttctgtgaaacaaaaaaagcatggacgaatccacactctgctcatattcccactgcacggctctctggtatcaacagacagcttctgcgctgtgcatttatccgaaagaaacatcccttcttacaaatgctgagacatataaacccgagacgcatcctgtgcgctaaggtgagagtgaactctgctttgttttcttcacgtactgtaacaggatatcatgactttcatgtaaagtcaagaacttttatgtgtttttttaaaccattttcaatgacagtctcctgtccggtaacttttcctgttctgccggaattccgtattttatttcctgtgaagatccgtacagaattactgcttttccggcaaacagcaaaacggaacgtttttgtctgctgggacgggtggtataaattgtcctgctttcctgataaataaaaaaagaactctttccgacagaaaccctgtcatcatcagttctccgtgtttattccgttacgacaacctgccgttatcggtactgcagtttttattttatacgggagcaattgtattaaagagtaatgacctcaatcttacataggatggagatggtggcgataaacattttaaaaggctgtcttaaaaatatgtatcctttcactgataacttgcttacagaaatgtcgcttacagatcttgttcgctgaaaagcggcattttacacttatttttgcgagctcacccctttgtgggcgattgctccctgtatgtagctaatataacatattctataatgatacacaataaaaatattgcgttatttcaaaaaatttaaaattttttgaccacaaccactgccctcttttttactgtatactacatttttctgtgataattttgctgtgataatctttaccctgttaatctgcagaataaaatccgaaaatacggaaatattacataaggcaatgatttatttaaggaggacacaaccatgacaatactcaactgcagtgcagtaacctgtatttataacaaagatcagctgtgctcccgcggagagatcgaagtaatggggcatgatgcccgggtttctgatgaaaccagctgcggaagtttccgtgaccggaacagcgcctcagtaacaaacagtgaaaaagaatcctgcggctgcgaaaaaatccgtattgactgcaaagctcatgagtgcacttacaacgagcactgtaaatgtacggcctctgccattgacatcaacggtcagaatgccggcacaagcaaagaaacaaagtgcaaaacttttgcatgtaaatgctgacaccttttgccggaagcaaacatatacagtccggtctgtatatgctgtttcatatgtcagtataaagctgtttaaaaaaggacattgcccgcaggcaatgtcctttttgcattggtttcagttttatctgtttttcaggaaatccggaatctggatatcctttttctgaactgtacttgtaggcatctttgtaccataagatgaattcatgttcggaagagaaaagctcggcatattgataccgccagcctgctttgccgctcctgtctgtgcagccggttttcttacagaaaacggtgaagatgcattgcttcttccgccaaaggaagaacctgctttcggagctgcatcggtaagtcctgtagcgataactgtgattcttgcataatcagcaacagaatcatcatacatcgcaccaaagatgatatttgcttcctctcctgtcagctcctgtacatagcttgccgcatcatttgcatccataagagaaatatcacctgaaatattaatgattacatgagttgcgcctttaatggtcgtctcaagaagcggggaggatactgcctgctgaacagcttccatagccttgtcgtctcctcttgcctctccaataccgatatgagcgatgcccttgtctgtcataacagtctgaacatctgcaaagtcaaggttgatcagtgccggcagattgatcaaatcggtgattccctgaaccgcctgctgaagaacttcgtcagccttgcggagtgcctccggcatggttgtccggcggtcaacgatctcgagaagcttgtcattcggaataacgatcagtgtatccactgcctttttcagattctcgattcctgcaagagcattgttcatacgtgtctttgcttcaaaacggaaaggttttgttaccacaccaacagtaaggattcccatttcctttgctgctgctgcgattaccggtgccgcacctgttccggtgccgccgcccataccacaggtaacaaataccatatcagctccttctattaactgttttacttcttctatactttcctcagcggccttctgaccaacttccggctgtgctccagcaccaagacctttcgttatcttttcaccaatctgaagtactgttggagctttacagagggttaaggcctgtttgtcagtgttgacacctacaaactcaactcctccgatggtctcttccaccattctgtttacagcattatttccagctccgcccacaccaatgactataatcttggcagaggactcagcttcatttgacataatctctaacaatgtacttcctccttttatttccccgatatttatcgtaatctacctgcatatagtatatcatatatttttttctaaaattaatcaactactatttttgtttttttatacttttttcatgtattttcgtcatttccagcttaatatccatcgccgtaataagcgtcttccccgctttcatcataggctcctgtttcctctgaaccatccgaatactcaccggattcctcgctgtaaccgtcctcatatcccgaatcagaatactctccttctgacccgtaagagctgtcttcagagcttccgtcctcactgtttccgtcagcttcttccgtattttccggcattgggcctacataatttccctctctgtcgtactctccggttccggtgaatccgccctcttcattatatcctcctgtccagtctcccattgcgtcaatggtttcctgtgtaggagcaggacctacataattccagttggcatcatactcgccctctccggtgtaatcgccttcctcatcatagccgccaacccatttttcaagagcatagtcaagagctgtcataggcttcgctcccacatattttccgctttcatcatactcgccgtctccggtatattcaccgttttcatcgtatccgccggtccagttttctgctgtcacttcctctatttccgcctcaaaggtaatggtctttacagaatccgttacattttccgcatgcaggatgcctttctgacctgcaagctggggaagaatcgcgatcaccctggtcattttatcttcaaggttcacatctttgcccagactgactgtaatatctccgtaaagaagactgatctcgtagctttcgtcaaattgaatatgatccggcagactgtcatttttggcaaaaatagtagaaagagcaaccgcggtattcagaacggtttcttttatgggtagcttctctccttttactacccgtttcacagctatcccgtcaaaaaaaggaacttttttatcctgtgttttttcgctttcaataaacatgccgttccggtcaaaataaatatagctgtccagatagggaatacagcccacagccttcttttcctttacactgaccacgatggtgtttctgtttgaccgtgtcaccttaaagccttccacaaagggaatatcccctgtgtcgtctgtggtataaaggatgggggcaagaacagagttttctgccattggtccccgaaggaccatggcctttatctctttttccgtataatgaccgcttcccataatctccacattttctaccttaaaataaagaaagaaaaaaagcacacctgccagaagacaggctcctattcccccaagtactatttttttctgcttatccgatatgttcagtttttttctgtattttgatgttctcataaaaatgcagttcctgtatcctcttctatctgcgcgcccaaagacgccagatcctcacatatatgctcatatccccggtaaataaaggaacatccttcgatgacagtctccccctgcgccgcaagagctgccacaagcaacgccgctccccctcgcagttctctggctctcactgtacatcccctgagacaggttcctccctgtatactggcctctctgccggaaacagcaacagaggcacccattttattcagttcctttgcaatcctgaaccggttttcaaagatattttcccgtatgcggcttttccccggaatggttgtcagtactgccatgagaggagactgaagatctgtgggaaaacccggatacgtatccgtttccagaaacggtaccggaaatgccgttccgcttccgtcagctattagtttaccactcctgcggttatattgtccacccattttcccatacacttcaagaaatgcatccagctctccctcaggcggattggaaatcgtgatcttccctcttgttgccgctgcagcacataaatatgttcccgccacaatacggtcaggaggaatctgcatatttccggcttttaattcttttacgcctgtgattctgatacagtgagttccttctccctgaatttcagctcccatgctgcgaagatatctgcacagccacacgatttccggctctctggcacagtttctgagaaccgtatgcccctctgccaggacagcggccagaatcccctgctctgtagcgcctacgctgatttttccaaaaacaatctctgcccctttcagacatccggcctcagcttccagactgttttctttttcttccacccaggctcccagacagcgcagcacatacaaatgctgatcaaccggacgttttcctattacgcagcctccgggatatcccatggagccttttttgttccttgccagaagcgcacccagaagaattaccgatgatcgcatttttccggtactgtctccggaaacttctgttccgtccgctctgctgcagtcaagataaagggtatttttttcccaccaggtaagagcacccagggatctgagaatgtcctccatacaatacacatcagctatggcaggacatcccttcagcacgctgactcctctgtgaagcaaagaagctgccatcatgggcagcgcagaatttttggagccctgtatggatatggtaccctgaagcggctttcctcctgtaatgcgaattttatccaaaccgtcactccccaaaagccctcttccttttatcctatgctgttttttcttttctgtgactgctcacactgagcgccagccccatctctgccagaagaaataccacggaggttcctccgtagctgataaaaggaagggtgattcccgtattagggatcgtgttggtaacaacagaaatattaagaatcacctgaattgccatatgccccataataccggcgctgatcagagttccctgaagatctctgctgtgcatggctgtcacgcagagccgccataaaagaagggcaaatattatgatcagaatcccggctcccacaagccccagctcttcacatataatagaaaagatcatgtcattctgagcttccggaacaaagcccagcttctggagactgctgcccagcccccgcccgaacagcccgccgcttcctatggcgtacagtccctgaatggtctgaaagcctttttcatatttttccggatttctccagatagccagacgttccagacgatagctttctgcagcaagaaacactgtaataaatgcaactcccgcacttcccataccgacgaactgcacatatcccggacttgacacaaaaataaggatcactccgattcccagaataatgatagccgtactgagattgttggaacccaccagtcccacaataggaagaagtgttgccatagtacggcacataaaccatatgccggatgtttttttgcggcttctgtcaatctgccatgcaagaaaaagaattactgccacttttgcaaattctgaaggctgaaaagacagaggtcccaggctcagccatcttttggatccattgatctcctgtcccaccagaagaacagccgtagacagaacaacagacatcaaataaacaaccggagcaagcgaaacccagaaatgataatccgtttccgataccacatacatggctgccagtcccagggctgttgcaaacagctgttttttgaaataataaaaggaatcatgaaatctcactctcccattgtaagaactggcgctgtacagaaacaccagaccgaatactgcaagaaaaatcacaaggatcaacagaagggcatcgggtcttcccttttttctctgtggctgctgtgacataagagcctccctgctgccgcgttattaataaatatgaagtttttcataaaaaatgaccggttcgtacatttgcgtacttccggtcgtttttaccctcatatccatcagagattttttacatattccttaaaacagtctccgcgctgctcataattgtcaaactgtccccagcttgcgcaggcaggagaaagaagaaccgcctcacccggctgagccttttctgcgcagatctttactgcttcctgaagatcttcacagagaatgcaggaacaaacacccagccgctctgcagcctctctgattttttcttttgtctgtccgatgagaaccagacttcttaccttgccgtcaaagctgttcagccattcatcatagctggagcctttgtcgtaaccgcctccgatcagccaggtaggacggttcattgcctggattcccttgattgccgcatctggattagttcctttagaatcattgtaatagacaactccgttcttttcagtcacatactcgatcctgtgctctactgctgtaaattcacagatactttttcggatactttcaacagatacgcctgcataataagccatagccgctgcagccattacattttcaaagttatgtttgcccagcagcttcagatcgtctgtttttacaagagaaatctcctgatcctctgttttcagaatgatctgtccgtcctccaggaaaattcctttttccagtcttctttcactggaaaaatatacggtctgcggcacaatattttttccgaattctctgagaaccggatcctcatagttcagaacacacacatcctccggcttctgattctttacgatcagttccttcacacggatatattcttccatagtatgatgacggttcagatgatcctctgttatattcagaatcgcgctgacacaaggagcgaacttttcaatggtttcaagctgaaagctggagatctcagccactgtcacagaatcctcggtcatttccagagctttggaagtataaggagttccgatatttccaactacaaatacagaatcctcggcatcctccatgatctttccaagaagggctgttgttgttgtttttccgtttgttccggtaattgcaagaactcgccctttccctgtacagaaagcaagttcaacctctccccataccggaaggccctgctcataaaagctttttaccagaggaaggtccgtcggtaccccggggcttaacactgccagatcaaggcttttctgcacctcttccggaagcccgcctgcgtagatatccgtttcttttatgctggcagtcttatgtaatactgcttctttgtccagatccgggtttccgtcatacagaaccgggcaggctccaacctgtcccagaagctctgctgctccgattccgctttttccggaaccaaataccagaacccgttttccttttaagtccatcactgttttcctccttcaattaaagcgccagaaatgcgatcaggcacatcacagcagttaccactgagaacactgccacgatccttgtctctgaccagccgcaaagctcaaaatgatgatggataggggccattttgaagattcgttttccgtgagtagctttaaagtatgttacctggatcataacagaaagaacctcaacaaaatagatcagtcccaccaggagaaggaacaaaggcatctgaagcacataggctgttccggccacaaagccgcccagagccagagatcctgtatctcccataaaaattctggcagggtatacattaaaaagaaggaagcccatgaggccgcctacaactgcgcaggtaacaggctcaatcccgctttttgttccgatggacatcacagtaaagaaaactgcaacgatcagcgtcacgctggatgcaagaccgtcaagaccgtctgtaaagttgacgccgtttaccgtaccgatcacagcgataaacagaagaggaactgccagcacaccaagattcagatagtgttccggccagaacggaattttcatggtcagagaaatatctgtatagttaaggatataaaaggcaaaaataccagtaactaccacctgaagcagaaatttctgccatgcaagaagaccgtcggaacgcttcagcacaaccttcaggtagtcgtcaagaaatccgatgattccaaatcccagtgtcagaaacaggatcggaatgatagccggataatcctttacataaaacagagacgttacaactgccgcaatcagaaatataatgcctcccatggtaggagttcctgcttttttcagatgggactgcacgccctccacccgttctgtctggcccattttcagttttctgagaaacgggataatcacaggtcccagaatcaggctgattgcaaaagaaaccagaaccggtattacaacttgataattcatcctcacacctcttatcattcttttgtttttatatcataatcagtataaggcttttccgggaaattatcaaccctcagtaatggcactgttactgtcagttaataatgacgcgtttttttactgctcctcttgtccggacaggctccgctcatcctcctctgatttttctgactttgttttttcaattcccagatacggaagcacattgtcaaaaatgctgcgcactacaggagccgcaatggttcctccgtaataaatcccctgaggatcatggataatacaaagagccagtaccttcggttcctctgccggagcaaatcccagaaaagaagaaatataacggtttgcacttctgggaagagtctgggaggtggctgtttttccaccaatggaatagccttcaatggcggcattctttccggagccttcagacactaccgtttccaggatttttctcactgtttctgaagtctcagaagaaacgatcccggtttccaccgggtattccagttcttttacctgagttccgtctgcgctctgaaccgccactccgaaatggggagtgatcctgtttccgccattgataagtgagcttacagtagtggcaagctgtaccggcgtgatctggaaagactgtccaaaggaaactgtagccagttctacatttcccatgttttccattttgtgcataatggttcctgcctctcccggaagatcgatcccggtctgtttcataagcccaaaccgcctgaaatatttataataattttccacgccaaggcgcagccccacttcaataaatacagggttgcaggaattctgggctccctccacaaaattctgagatccgtgtcctcttctgtttgcacagtggatccttctgtcgtccaccagcttatatcccgggcagtagaatctgtcatttaatgacaccaccccttcctgaagccccgccgccatggtaatgatcttaaaggtagagcccggttcataggtatcattcaaacagggattcctccacatctgattcagaagatcctgaatcttcttctgatccatggatgctgtatcctgtccgatattcagaacaaagggttcattcagattaaattccggaacattgacacaggcataaatttctccgttttggggattcatcagaagaatggacaccctttcggcctgcttctcttccataaccttcagagcagcctgctgcacgaactcctggatactgatatcaagactcagtctcagcgtatttcccttaacaggctctgctctccgttctccaagaccgtcgatctccacacctctggcatctgtagtggtcaggatctttccctgaatccctttcagaacctcttcgtattctacttccagtccaatgatcccctgattatctccccctgtaaagccaaggactttggatgccagagagtcatagggatagtatcttttataatcctcatccacctttaccccgtccagtcctgcctttcgaatggcatctcctgtttctttttccacattggtgcggatccgttctatggatgaatttttttccaccttttttctcactgtttcttctgacagaccaagctccgacaccagaagacgaatcaccttttccgggtctttgatctggctgtgaatcacagaaaccgtgcacacagttttatttgctgcaagaacctttccttttgcatccagtatttcgcccctggctgctttgatatccctttccctttcatgaagctcttccgccttttcataataataatcagaccggaagcccatcagccacacaagccttcccagaagccccagcatcattgctccgcagcacaaaaaaacaacccatacctttttcttatgaaaggttctgttttttttcataaaaatgccccacagagatcatcacaaaaatatatgatttctctctgcggggtatgtttttatctttcttttaatccagtccggcttcttcgtttgtcagaccgtcactttccatatcatttcccacaatgggatcttcctgattttccggcggcgccggcgctgccgggttggaaactgcatctcccactgcttctccgctttctgaagccggaagcgtttctccggaaaagctttccaggttttctgatttgatatactctccgttttcgttcagctttctctctccgttttcattaagaagatagccctgctcgtctacccggtttccttccatatcaatcagatttccctctgcatctaccatatttccttcttcatccacatcgctgccggaaacatcttccagcacaccgtcaaagccttcccagagctctgtttcaggaactacgccttcctccgcctcatccggctcaacattcagatacggaagaagctcagaaagaattccctgggcaatgtactggggatatttactgtcagcctgctcctctgcgtttggctcgtcaacaaccacatatacgatcacctgcggttcttctaccggggcaaaggtaataaaggaaaccagatactttttgtttccacgggggaatttttccgctgtaccggtcttaccgcctgaactatatccctgtaccttggaatggcggctggttccctcaatgacactgtcttccatataagaacggatagctgcggaaatttcagaggaaatagtctgtttcaaaagaacaggttccactgtttttacagtgcttccattgctgtcctgtatttcttttacaagatgaggctgataatagtagcctccgttaataacagaactcatggcattgatctcctggagcatggtacaggtatatccctgtccaaaagcagagcaggcaagctctgtctctcccatggtatccatggtatggataattcccgatccctcattcggaagatcgattccggttctgcttccgaaattaaaaagactctgcgctttaataaactgttctgctcccattttttccgcaatctgcatcattccgtcattgcaggaattggcgatcacatgcatcagatcctctgttccatgagcatccggataaaccgcacatttgataaatgtattattattggctccaaacgcctgtccgccgtcacagacaaaattatctccctctgctatgctgcctttttccaaagcgcctgccataacaataggctttacaacagatccgggctcaaaggcatctgtcacacagaaattattccacatggcattcagtgcagttacggtttcctcatcattcatggccttgatctcttcctcagaataaaggctggaaagatctctgggatcattgagatcatagcggtccccggcatccatggcaagaatttctcctgtattgggatcctggactacaacgcctatgttcttggctcccatttttttcttaaagccgtttacatatttttctacaatctgctgtatgcctacatccagagtggtaacaatattttttccgtccacaggctcaatgatcgtctgctccacatcggactgactgttaaaatatccgtactgtctgccgtcagcgcccatcagggtactgttgtagtagctctcaattcccacatccgccacatccctggcaagagtaaagccaatggtatcacaggccagactcttaaagggataacttctcagataatcctcctcaaaccatacacctttgacgtttccgcgctcttttttttctgtatcagacagagggctgtcctcctccacagtggtatatgcttcaaattcctttttcttatccatggaaagctgtttcagaagaatctgatactggctttgacttgtacggctgtctgaaagaagagaacggactttttcttcgtcaattcccagtatttccttcagagcgcgaatagtaggctccacataatctggatctgaatttaccgtcttacagtcaaggattacattgtaaaccttgttgctggtagccagaatatttccatttctgtcatagatatttcccctttttgcaggaagcacatcattctcaaacttctgctgcgcctgggtcagaacctgttttttgtatttgtcgccatttgttgcattaatataggtaattcttcccaacaaacaaactaaagccagcagcactgctccaaacagtcctgccagctttcctttcatctgatgatttatttttttccggggtttccttcttctggtcctcctgtcgtttcccaaattctcacctcttatttgtcaggtacatcctgatactgtctcacataactgttatttgacatgctgtatgtctttttctgttcctctccgggatagttcattcccagccgtccaatggctatttttttgatcctgttcagatccacgctggaattcacctgactttcataggcattgttttcttccctcagttcactgagttccgattccagcactgccacatttttgatacggcctgtaatatccgctctgagctgcagataattcacacagcagaacagaactgccacagagatcactaccagaaaaaaaacaaatccccgccccatgctcatggctttctgacggtttctcattgtttctctgctgactgcatgtgcacggcgcgccgtttttgccgaagaagcttttgtagtcttcctctgccgtctgtcctgtgttccccgtacagccggtatgtttctttcaggtacttcctgcagacgtcttactgtatttccatccacatacattccccgggcgtttctgacattttctctgcttcttctggctgtcaccgctctgtttgtcctgtccattttctatcactaactttccttaacattcactaaatcttcctgctgctccactctgcgttcaaatatacgcagcttggcgctctttgaccgggaattatcctccagttccgctgctccgggcaagatcggtttcctggtgatcacttttcccatggacttcctgccgcacacacataccggaaaatccggagggcaggtacagggattttcatttttgcggaaaatagtcttgacgatcctgtcttcaagagaatggaatgtaataatacagatccttcctccatctcccagcatcccgatcattccgtccaaagactccctgagtacatccagttctctgttcagctcgatacggacagcctgaaaggttctctttgcaggatgtcctcccgctgcctgaatcttcatgggaatcgcacggcggataatttccgtcagttctcccgtagtctgtattggcttttcctgtctggcagccacaatatgttttgcaatattcttcgcaaatttatcttcaccgtaatcacgaatgatccggtacaactctttttcttcgtaaccattgataatatcagctgctgtacgggtctgtctctgatccatacgcatgtcaagaggcgcgtctaccctgtaagtgaatccgcgctcctcattgtcaagctggtaggaagatactcccagatccagcaatattccgtctacctgatgaataccaaggtttctaagctcgtttaccatgtaacaataattgctgcgaatgatcgtcactctgtcttcataggcagccagcctttcactcgcagcaattattgcatcctggtcctgatctattccaataaatctccccttggcagaaagtctgctgcacacctctacggcatgccctgcacctcccagagttccatccacgtagattccgtcaggctttacattcaaaccttcaatggtttcttccagtaatacagatttgtgtctgaattccatatacgtctcctgtgttggatttacttccggcgtaatacttaaatgatgatacccatgtcctgcataccctctgcaatactgtccatatcatcataattacagttctcgctccacttttctctgctccagacttcaatcctgttcagatttcccgttaaaaccacgtccttttccagaccagcaaactcccgaagcgtctgaggcacgagaattctcccctgcttgtccagctcacacattgtggctcctgcaacaaagaatcgtgagaaggttcttgcattcttatttgtaagtggtaaggctctgagtttttcttcaaaggctttccattcatccataggataaattgaaagacaaccatccagtcccttggtcagaacgaactcttctcccaaaagctctctgaacttcgccgggatgatcagacgccccttcgcgtctattgtatggttgtattctcccatgaacatgtaactcacctactctcgcaaagtacgattctccccttcgtactttccagcagaaacggatgggtctgccatattccctccattcactaccactattcaccactttctaccacttatgaacccattctaccccatttactttgaaattacaagtgggaatatcaggttttttattttttccctttaaaaaaatccggtcttttccggctttttccatcataaaaaggattctccggcaaacctgccacagaatcctttttcgttgttatatgctttgaaatttctcaatcagcctgtcaagcttccggctttccctcagacattttggaaggtcttccctgttctggatcatcccgttcagctttctgcggcagttctgtatcttccgtttcagttttttctgattcaacttcttcagttctgctgcctgatccggcagagactctctgatccgttttttcctccacttctgcatcttcaggaacctctttttcttcagtctctttaatttcgtctgtgatatctgttcccataaattcatgagatacgtcctcgtaagtctgaatatcatcataattcagaacagctcttttttcctctctcctgcgggctctgtgcctttcccgtttttttgtcagacttctgcgaacagaagccataattccaaacataacagccagaacaagcagaacacacgagaacaccggaatctctgttcccggaacagtcacgggctccggcagaagaaattctatccctgcccgtccaagactgtatcctgccagatatcttaaaaaaatctctcccggatattttctgtgttttgtgtacagcagaaggatcagaaaaagcgccaggcaccagatactctcgtacagaaacagaggatgtacctgtatccaggaaataccgtctgcttctgtcagatgaccggccatcagccgggaaatctgagccttatttactgcatctgcaggaatctgcatagccagaaggctgtccgtatattctccgaagccttcccggttaaaaaagtttccccacactgctattatctgcgctgtcagaaatcccatactggcagtatctgccacctgtgcaaaggagattttccggattttacagtaaattgctccaatcaggattccgcctaaaacaccgccgtatatagacattccgccattcctgatatccgcaatctctattattgattttcccgcaaacatctcccggttcagagccacgtacattagccgcgcccccaacacaccgcctgcaaaagccggaatcattgcttccaggctaaggtttggatcctctttttgtttttttgccacaaaaatcattacggcaagtccaagaagcatgcctgctgctgtcagaagcccgaaaaaagtaagctcaaatccgaaaacagaaaccgatcttcccacaaagctaaaatcaatatccagatttgggaatcgtactgatgtattcatacacgcacctgcttatacattgaaacggaacaggatcacatctccgtcctgaaccacatattcctttccttccatacgaaccaggcctttttctctggctcctgcataagagccgcagtccagaagatcctgataatttacaacctctgccttgataaatccacgctcaaaatctgtgtggatctttcctgctgcctgaggcgcttttgttccgatcttaatggtccatgctcttgtttcatcctctcctgaggtcaggaagctcatcagacccagaaggcgatagcttgcgcgaaccagcttttcaagaccggactctgtcagcccgagatcctccaggaacatttttctctcatcatcatccagctcggaaatttcttcctcaattcctgcacagatcacaaaaacttcgctgttctgctgaaccgcataatccttcactgcctttacatgaggattggacgctccgtcgtctgccagctcgtcctcagccacatttgccgcatagatcaccggcttccaggtcagaagattataagttcccatccaggcttcctcatcttctgtttccagttccatagtgattgccagttttccgtcttccagatgagcctttattttctgaagaaagtcaagctctttggctgcttccttatccattctagctgttttcgtaacctttgcgattcttctttccagaatttcaaggtcagagaatacaagctccagattaatagtctcaatatcacggatcggatcaatacttccatctacatggatcacattcggatcctcaaaacagcgcaccacatggacaatagcgtctacttcacggatgtttgccagaaactgatttcccagaccctcgcccttggacgctccttttacaagtcctgcaatatccacaaattcgatcactgccggggttacttttttggaatggtaaaaatctcccagaagcttcagtctctcatccggaactgtaaccacgcctacattgggatcaatggtgcagaagggatagttggctgactccgctcctgcttttgttaaagaattaaaaagtgtacttttgcctacgttaggaaggccgacgattccaagcttcatgttttatatttcctcctacaaatcttttgactgtttttcagcataataaccgctttcttttcaggaagccttaatacattgccttatattttaccataccataatatctttgtgaatattcagtttaaaattccgccacatttcttatctctcttatatttgattatatcaaaatacacccaagcagcaattttcaactacctgggtgcaattcactttttattaaattttcatcttgagttggcgcatcatatgatataaagtatgcacttctacattaaagtgtttcgcaacatccggtatcttcacacgtccacatttattcttaacatttaatggtcctgcggactgttcaaaggtaatcaatttatatcctttcgcagcagctgctgcaatcaaccatggatcggcaacctcatttctagcccaatcattcaaacccttttcattgtaaaaaccacattcttgaatatattgcattacttctgcatatttagggattatttctgaatcaacatgattacaaacctgaaattcatgttttctttcagatacccactgttttaactcatcctgccccttatcaatttcagcttttaccatatcaagcagaactatattacctgcttttatcttttcttcaaaaattccccaaaatgaaggaatcaaatcataagcataaaagaaccttgacgctgtcatcaatgtatttgcatcaatcaaaaatttttctgatgaatttaccataaaacacatccaagtccacttgcaacttcagaaaatgttttgctagtagtattcgttaatcggtaagcttccgtaaaagaagttctaccactatttacactttcacataatgcacgtacaaaaacactatctaatttgctacgagcaactctgtaataatcaccaccagaacttccctctttttttgcttgaatgtacgcttcgatagcatctgctatcacccgatcatatacgctcttatcaatcgtcttattatctaaagctctacgagcaatgacactgccactacaacggaacattctggcaagtaccttaatcctttcatgtatatcgtcatttgtattactattccatttttgaagaaacacattttccggtaccattaactctcccgctaccgcattgcaaataaactcaatcggctttgtttcatttatagaatatcttctgtcattatataaatcgttttctccaatccaaagatgtaccgtctcatgaaacaaggaaaataattttccacctgcagaatctgcaccatttataaaaatcaacggtgcccattcatttaccattgcaaacgctctaaattcatttacatctaatactcgatgggtatttttaccaacaataccattcatcatcacaacaattccacaatcttccaaaagctttcttaccttattgaatgcttcagaagaatcagcacatgtcccataccattcaacagtaagtcctaaatcgttacgaattgtatctgcgattatctttatgtctgtgaaatcttttaagcttccaacaacattaattacatcataattccattcttttcgataatcaatcatccattcctgaactgcttccatctcacgaatagtgtcaattaaattccgacttggatttgttagttctatactatcaagcgttctatattctaataaactaatctgttcaactggcggtgtctgcaaaaagaaatatcctagcggaatgtgagattttttactgaaatcttctatctgattaaaagtcggacgttttgtgccatcaagccattgcttgatattttccataagctttgtacccaacttttcttcgctagtttgactaagtgcccagctaatgatcgccggctgtacattcacatttactgttggcataatacctcctccttccacctatacttaattatagtatatcaagagtttgtcagaaacactacttttttataaacttttaaaattttatattgttacattcaatcccttgtcatcagcataagaagggttcctttttcaaattctaccacagcctcctctgccacaatctcattgctgaccgtaaggccgctgtcggaagcggtcagataatgacagttcaggggatatttaaagcctttaagagtaagcccgggtacgtctcctccaatggaaaaaaaggacacatattttccgaactgttcagaccgtttcagcacagttccgctttcaataagtttcatataattccagggatccgcaaggatgatctcacagcccctttcccttcccagaacaagaagcccgaaatttgccataagatgatccactctgtttcctgtggcacccaggatcataattcgtttcatacctctgtccatggcaagacaggctgccgactgcgtatccgaatcgtccttttccgggcgaagcctgatgatctccgtattgctaagtgtttccagaaattttcttccgctttccgaaaggctgtcaaaatctcctactgcaatatgcggaacaagccctgttttttcaaagaattccaatcctctgtctgctgcgatcagcaacgtattctcatctgtattttttttcaaaaaatcgagggcaaaatctgtattgatattgcccccgcttacaatgactgcgtttttcatgatatgtctcattcaatctcttctttaatatgctgcattctttttgtaatatgttttacattggaagcaagatccccattaaatacataggaacctgccacaaggagattggcaccggccttcataactgtttccattgtttcatcattgattccgccgtcaacctgaatatcaacatccgcatgctctctgtcaatcagttcacgaagctcttcaatcttttctgtgcactcgttcagatatttctgtccgccaaagcccggctgtactgtcatgacaagaaccatatccacatcatcaagcagatggctgatatcatttaccggagttgccggcttgatggaaacgccaacctttactcctgcatcacggatcagctcaatggcacgttccagatcttcacatgcctcggcatgtacagtaatagaatctgctccacagtctacaaagtcctgaatgtaacgttccggagcagataccatcagatgtacgtcaaaaaacatctttgactcttttcggatagaacggatcaccggcattccaaaagagatacttggaacaaaatctccatccataacatcaatgtgaagccattttacgccttcctcttccagagtctgtatctgctgacccagacggttaaaatctgctgataaaattgagggacacaaatgatagtccatgtaatcaatatctccttttctcttttaattcttcatataatcctaaatagtcctcatatctgagacggctgatctctcctgcctcaagggcttcctttacacggcagcccggctcatggatatgtctgcatcccagaaagcgacactgatcatcgtattttcggaactcaggaaaataatccttcagttcctgttcttccatatctgtaagatacagggacgagaatcccggcgtatccataagataggtgttttctcctgcaggaatcacctgggaatgacgggtagtatgtttgcccctcttcagcttcctgctgatttctcctgtctccatctgaacttccttctgaagaagatttgtcagagaagattttcctactcccgaggggcctgccacaactgtggtctttcctttcaggattttatatatttcctcaagcccttcttccttaagagcactggataaaagaacctgatatccgcagccggtataggtatcataaagctttcggatctctgtttcctctgccaggtcttttttattgaagcagatcactgccggaacaccggcctgctccatcataatcaggaatctgtcaagaagcataaaattcggttttggatcatccatggcaaaaatcacaaatgcctgatccacatttgccactgcgggacggatcagagaatttttgcgggggaggatctttaccagattcccctctgctttttcctgatccagcacagtaatttccacattgtcacctaccaaaggcttctgattgtccttgcggaaaatcccccttgccctgcattcataaacattgccgtctttcgcatgtacataataaaaaccggcaattccttttatgatcttaccttccatgcattactctgctttctcaaaagtaagaggataagttccaagctgctgatattcgccattgatcatttcggatacagaaagagttccctcgcttacccccgggcttcctgtaatatccagtttgtaagggaaggtaagagtctctccgtctacaactgtagttgcctcagattctccgtttacttcctggatcagctccagacgcagcgcgcctcccttgtagtcctgaggcgtattcagactctgtgtacatttccatacttctccgtttgccgctgcctgctgctgagcagatgtgtctgcgcttgtctgtgctccagaactgtctgccgccggttctgcttcaggcggctgatctccggagcttaccacaagactggccggctcatccggatccgcagtttcttctgcttccggtgactgagaaataacctgacctgccggtacatccgcactctgctgcttcgtgatattgatctccagccacttaccaaactctgttacggcctcttcctctgtctttcctacaacactgggaaccagagcgccctctccccagtcaagtcctctgctgacagtaagagttacggtatctcctgattttgcaacagaacctgcttccggagaaactgcgatcacatatcctggttccacatccggccattccattccatctgtatcatctgtatccgcactgtattctttctgaacatttaccgtaagtcccatatcctccagagatttctgataagcatatgcagttactgtctcatcatactccggaatagtcagctcttcctgccccttactgatataatacttcagagttgtatatgcctcaacctttgttcctgccggaatatcctgggaagagattcttcctttttcctgatcagacgcttcctcgccaaccatctgcttgccaaggttgacagcctccacaagagcctttgcctcttcctcggtctttcctaccagatccgggacctcaaccatgccttcatctttattatcagcctgctgcacctgtcccggctcttctgtcttgtcaaaaacgcccgtatttttcacaataagaaatacgccgcctgcaagaaccgccgctcctgcaagaagtgcgacaattgttactgctctgcttgtagttctgcgttttttctttttcttctttcttctttctgcagcgcgtctgcgctcatactctctgtcatcatcaccgtcgtcatagtcggtctcgtattcttcttcctcaagcatctctacttcaggttttctctgagccgctctgtttttctgagtgtgtttgatctcgcccagctcctcgtctgagatcacaacggtcttggcatctgtgtccactacgtcgttcagctttacaaaatttccctgaggatcgatgagagaatgcttcagatctgcgatcacatcctccattttttcgtaacgacgtcctacgcttttctgtgtgcatttaaaaataatctgctccagactgtaaggaagattttctgtgtaaacgcttggaggaaccatttcctcctgcagatgcttgatagcaatggctactgtagtatctccgtcaaagggaacgcgtccggtaaccatctcgtacaaagtgatgccaagtgaatagatatcagatttctcatcactgtagccgccgcgcacctgctccggtgaactgtaatgaacagatcccataacattggaactgatcgtattggaggaagctgctctggcaatgccaaaatctgttaccttcacctttccgtctgtggaaatgataatattctgaggcttcacatcacggtgaacaattccatgattgtgggctgcctccagtcccatggaaacctggattgcaatactggtcgcctctttaatagaaagctttcctttttttgcaatatattccttcagggtgattccctctatcagttccatgacaatgtaataaacgccttcatcatcgcctacgtcaaatacattaacaatattcggatgtgtcagtccggctgctgcctgagcctcgcttctgaatttccggataaaggttttgtcctcccggaactccggcttcagcaccttaaccgcaacaaaacggttcagcttatgatcctttgctttatacacatcggccatgccgcctgtgcctattttccctaaaacctcataacgctccgctatgatcattcctgcttttaacatttgtccacctcatttgtgaatggttctactaaaaccactgcaatgttgtccttaccgccgttctggtttgcttctcttaagagtttttctcctttttccggcagctggtctgtctcattctgtatgatttcttcaatcttagcgtcctctaccatgttgctcagtccgtcggaacacatcaggatcgtgcttcccggctccagctgaagatcaaaaaaatcaatatcaacagttctttccgctcccagcgctcttgtaatgatatttttgtccgggtgatttcttgcctcttccggcttgatctctcccattctcaccatttcctgcaccagagagtgatctttggtaacctggtgaatctgcccctggatcagatacaggcggctgtcccccacatttgccacatatgcataatgtcccacaattgttgccaccacaattgtagtccccattcctctgaggtcttcctcttcctgcgcgcgggtcagaatttccgcgttggcagtttcaatggcatgacggatcaccttgaccgggttaaaatccgcgtctttccgaatctcgtccactaatatctgaactgcgtgggaagatgcaaaatctcccgcgttatgaccgcccattccatcagcaacgacaaacagattgggaagatttcctaccgggtctttggacacgaacacataatcctggttcattttccgcttctgccccacatctgtagctgaatataccctcatgtcacttctcgctttctgttttttccatatacctttttcttagttgcccacaggcaccgtctatgtcgctgcccatttcccttctaatagtaccattaattccacatttttcaagatttattttgaaattctccactgcctggcgtgtagaacgtacaaaagaacgctctctaacaggattcacaggaatcaggttcacatggcagttcagtcccttcagacggcctgccagctccctagcattttcctcgctgtcgtttacccctgctaccaggctgtattcaaatgtaattctccgtcctgttttatcaaaataattcctgcatgcctccagaagctcatccatactgtatttttttgcaatcggcatcagctcctgcctcttttcatcatttggagcatggagagataccgcaagagtcatctgaagcttctcctctgccagctcatacattttcggtacaagtccgcaggtggacacagtcagattcctctgactgagatgaagtccgccttcctctgtaagaatatggataaatctcagaagattatcataattatccagaggttctccggatcccatgactacaacattggaaactctttcccctatggatgcctgtatccggtagatctgatccagcatttcagaaggcagaagatttctggcaagccctccgatggtggatgcgcagaatctgcagcccattctgcagcctgcctgtgaggaaatgcacacagagtttccatatttatatttcataagcacactttcgatcatatttccgtcgctgagccggaacagatacttccgtgtaccgtcagtttttgaaatctgtacgtccactgtttccagagccgtgataggataagcttccagtttctgtttcagacttttgggaaggtttgtcatttcttcccaggaagctgccagatgctcatgaagccagctgtaaatctgttttgcccggaaaggcttttcccccagctctgtcatcagctccttcagttctgtcagtgtcattgatttaatatctgtcattgatctatttccttctgaatcttgcaataaaaaatccgtctgttccatgaacgcccggaagcagctgcagatatcccagagcagttgtctcagatttcagttcgtctggaatatactcgtcaatgctttccagcttaaaaggatgattgttcatgaaccacatcatattttcttcattttcctcttttgcaatggtacaggtactgaaaataagcacgcctctgggcttgacatattcagcagctttgtccaggatattccgctggaggattaccagctcttcctgtttctgcgcagtagaacgatatttgatctccggcttcttgccaatgactccatagccggagcacggcacatctgccagtacaatatctgcctgacattccgaatccacatcgaatacagtcgcatcctttacctttgcctgaacgttgattgctccggcgcgatgtatgttttcttcgatgagatccaccttatactggctcacatcccgggcatccacggttccaaagccttccatcttatcacccatatgaagactttttcctcccggcgccgcacagaggtcgatcacataatctccctttgaaggattggcaatttccgcaacaagcatggagcttacatcctgaaccatgatctttccctggataaaagcatccagagcaagaatatgattaaaatccgagattttttttgcatagggaagatacggagcatcctccacagtcactccctgcgcccgaaggctttcacaggtttcctccacagaattcagatatgtacggcagcgtacagtcagtgatttttcttccagaaaatccgccagcattttttctgtagtttcctcaccatacacattcagccaccggagcaccagcggctccggcatggaatattttacagaaagatactttaccagattcttttctctggaaggatactcaagctcgtccatctgtcttgccacggtacggagaactccgtttacaaaaggcttcagattataaaagccttttttctgtgcaagctttactgcctcgttgcacacagcgctgtccggcaccctgtccataaatttcagctgatatacagcgcttctcaggatctctcggataggcggtttcattttatctactgttatctttgaaaaagaattaataatatagtcaatataaatcctgtattccagagttccctcgcacactcttgttacgaaggcgcgctcctgcttgggaaggaactggtattttgacaacgcattacggatggcaatatggctgtgttccccctcctcgtcgatctgaagaaggatctccaggatcatttctcttgtattgatgccgttagtcatcgtttctacgtcctcctgcaagaataatcagcctcaaaagctgaagaattgatgataccagcgccgctacataagtaagagccgctgctgtcaaaacctttctcgctcctgaattttcctctcttcccagaatccccgtagtttccagcatacgcagagcccgtgaagaggcattgatctccaccggaagagtcacaagctgaaacagaactgccagagaaaacagaatgattcccgctgtgatcagagggcggatactcataataagccccaggaaaaacagcggccaggacaatgtacttccaaagtttgcaagaggaacaatggcgcttcggatctccagaggcgcataatgaatggcatgctgaatagcgtgtccgcactcatgagccgccactcccactgcagccagagaggactggccaaagatatcctgagaaagatttactgtttttgttctgggatcataatggtctgtaagacttcccgacacagcgcgcacctgtacgtctgtaatgcctgccgcctgaaggattcttcttgcagcctgctctccggtaagcccggaagcgcttctgacacctctgtactttgcaaaagtacttttcagctttgcagaggctgccacagaaagaagcattcctattatcagaagtatatatgttctgtcataataaaaaccatatccgtacatgtcttatcactccttatgatctctcagcactgttcccggctccacctgatatcctctgaggaaagacgctgcgtccatacgtttctttccctccagctggacctctgtcagtaccagaatgtcttttccgcaggcaacatgaatcccttctctgtccgaatctgccgcgatcacagttcccggtgctgctgaaggttttccgtctccgttcagcacagatactacagaagcctcccagattttaaaggttttcccattcagaaaggtataagcgctcggccatgggttcatgcccctgacaagacgttcaagctcctgagcgcttttacgaaagtccataagtcccatctgcttggtgatcatagaagcatatggcgtaggactttcctccggctgtttttccatcactgctgttctgtcaaaaacagaaggaagggtttttaccagaaggtctgctcccagatctgccagcttgtcaaaaagactgcctcctgtttccttttcatccagagtgacagctgtctgagatatcatatctccggtatccagtcctgttcccatctgcataatggttacgcctgattccttttccccgtcaataaccgcctgctggataggcgcggcgcctctgtactttggaagaagagaggcatggatattaatgcatccaaattccggaagctccagaatcgccttgggaatgatctgaccaaaagctgccacaacaataatatccgggttcagttcttttaaaacttccataaattccggatctctgacttttttcggctgatataccggaatcccgtgtttcagtgcttcctcctttaccggggtgggaagaagagtttttcctctgccctttggcttatccggctgcgttacaactgccgtaacctcgtatccgttttttacaagagcggcaagaggcggcactgcaaaatccggagttcccatataaacaattttcatattttacacctcgtcatcatcataaaccgttctgtgaagttctccctccacaagctctgtgtacatttttccatccaggtggtcgatctcgtgacagaacgctcttgcaagaagctcggttccctcatagaccacctcttccatattttcatcaagagcctttacttttacataattgggacgtgtaacctgtcccgccattcccggaacactgagacagccttcgtctccggtctgctctccggaggtttccagaatctccggattaataagaaccatcggaccgtctcctacgtcaatagtaaccacgcgcttcagaatacctacctgaggagcagcaagtcccacgcccatttcctcatacatggtatccagcatgtcaaaaatcagtgtgcggagcttgggcgtcatttctgttacaggtctgcttacctttgttaataccggatccccttcagttcttatttttctaagtgccataattcattctcccttctatggtgattctcttgtgtacttttgcagatcatcattcctgcacggagtatcttccggcagttttctgtatcgtcgtatctctgccgtaagacttctctttgtgcatcagatgtaatcatactgtatatgtaatttccgaaaaccggaattgatctctatgtatttttcaaatttattttttatgtccagaagaacactttcctggctgtgcttcagatacaggacctttctgtacacatcgtttacctttcctacggaagcccaggcaggtccgataatatgaagctctttccccggactgactctctccgcaaactttctcagaaagtccattcctttttccagaagctcttcatcctctcctgatccgagaacagacagcatgtgcgcagcaggaggatagtccagaagagtgcggtagctcatttcctcttcataaaatttttcatagtcctgctctgctgcagcctggatgctgtaatgatccggatgataggtctgtatcacagcctctcccggcttttttccccttccggatcttcccaccgcctgagtgagaagctgaaaggttctttctgcgcactgataatcagaagcattcagagaaaggtctgccgctatggcacctaccagtgtcacatccggaaaatcatgtcccttgacgatcatctgagttcccaccagaatgtccgcctcatgggctgcaaaggaagaaagaatctgttcatagcttccttttgttctggtggtatcgtaatccatgcgcagaataccggcttttggaaaacatttatgaagaacagcctctatctgctgagttcccgccttaaatcctccgatatacggcgaaccgcaggagggacatacctctgcttttggcctctgatagccgcagtaatgacagatcatttttccattgttatgttcagccagagcgacgtcgcagtgaggacatttcagcacctccccgcaggaacggcaggatacaaatcccgcataaccgcgcctgtttaaaaacagcatggtctgttctcctgcattgagcctctgctcaatggcagcttttagctttctgcttaaaatcgaccggttccctgcttttaattcttcccttaaatctacaattgatacttcaggaagaggacgtttttcataccggtctgtcatttttaccagcgcatactccccggaaacagcctttgtatatgcttcaagagaaggagtcgctgagccaagcacaaccctggctccttccatcaaagctctccggactgccgtttctctggcatgatatctcgggctgctttcacttttgtaggtctgctcatgctcctcatcaatgatgataagtccaagatttgaaaacggggtaaaaagagccgagcggggacctaccataatctgtatttccccgcgtctggctcttttaaactgatcatacctctctccgggcgaaagcctggaattcagtacagagactttttctccaaaccatccgtaaaatcttcttactgtctgataagtaagagcaatctccggaatcagaacgatcacctgctgtcctttttccgccaccgtctgtatcagcttcatatacacctgagtttttccgcttcctgtaattccatggatcagaaccggacggggagcaggtctgtcccactccctttttatttcttcgaaggctctctgctgtaccggtgtcagaacggacagctcttctctcggaatcacatccccgtccacagacatacggtatacttcatcctgctctatacggacaattcctttttctgccagaggcttcagaacagaagcattgatcctgagccttgccgcagcttctgtataatccaggcttccctcttccagcaaagccctgaccagtcttgctctggccttacacctgccggattcaagggtttgggcaagcttttccgcctctttcctttccacattcagacagatcatccgcttttcctttgcccggatcttttctcttacaggaagcacggttttcagagcctgagccattgtggagccataacgctccctcatccaggcagccagggaaaccagcctggcttctgttgtttcctgactgctgagaagcttcccaaccggcttcagcttttccggtgatattttcggttcccgggaaagtccgatcacatatccctttcgctgacagtttccaaagggaactgcggcaaccataccgacacgtatctctgattccagttcctcaggaactatatactgaaagcttctgtccagcttttcatgggatatgtctatgataatatctgcataaatcatgcaatctctctttcttgctgccagacagttattttctgtcttcttccaggatctccgcgatcagaacgcgctcatccatgggatattttttccctttgatctcctggtaatcttcatggccttttccggccagtacaataatgtctcccggttctccatggtggatggcataggcaattgcttccttacggtcgcagatctccacatattttccactggtttttgcaattccggtcttaatatcgtctatgatctcctgaggatcctcaaatctggggttatctgaagtaatgactgtcagatccgcaagacgtccggatacctctcccatctcatagcggcgcgatttcgcccggtttcctccgcagccaaacagacacacaagtctgtgtggatgatattctcttagggttgtcagaagactttccagagccatggcattatgagcgtagtcgatcatcagcgtaaaatcgtccgatacctttaccatttcaatcctgccctttacctttgccgccttcagagcgcggatgatgttttcttcggaaaccttaaaatgacggcagatggcaatagccgtaagggaattgtaaatactgaattttcccggaatatcaatctctacagggaaatccataagtccctttacgtgataggaaatgcccaggctgccttttccgcctgtcatatgcgcatcctctgcccttaagtctgcctctggcgaaaatccataggtttcaagcgcgcaggtatgatcctgaatgatcttccggaaatgctcgtcatctctgttcacaattccaaccctgcactgtttcagaagcatggatttacaggaaagataatgctcaaagtccctgtgctcatttggtccgatatggtcaggctctatattggtaaaaataccgtaatcaaacacaaagccctgggttctgtgaagcataagtccctgagaagaaacctccattaccacacagtcacagcctgcgtccaccattttgcggaagtattcctgaaccacataggattccggggtggtatttgctgcaggaatgacttcttctcctatgatcgcctcaatggttccgatcagtcccaccttatatcctgcgttttccagaatggactttaccatataagtagtggtggtctttccctttgtccctgtgattccaatggttttcagctgctctgccggataaccgaaataagcagcagaaataaaggccattgcataccgggtatcttttacaagaatcaccgtcacattctcaggtgcctgcacgttttcttccaccacaagaaccttcgcgccctttttaataacatcggaaacaaatttatgtccatccacaactgcaccgcggatacagataaaaagagagttttcctgtactttacgggaatcatagacaactgtgcttacttcctgctcaacagttccctgacagcaggtgtattctaaacgttccaataatgctgatagtttcatttttcttcctccaagaagcatccggcagcattctgccgttgaatatactcttttatagaatagcacacacaggggggcttttcaatgtttccttttcttatcttttatacacagactcagggatgcccatccaaatgcgcccaggagaagcacacaccataatgtcaatcttgtttcatcgcctgtctccggccttgtggaggcaggataacttttttctgagggtggttcagggttctgcacttcctctttctgctcaggctgaacagccttatgaacctgcacttccgcactggaggtcattgttttttccccggtttcttttgttactacctccacttcattgatcagtttactgctttttatatcttccggtatcacaatctccgcctgaaggctcactgactgtccgggcggaagctgactgaccagcgcctttgttcttgtactgtcaagaatcactccctccttttccagaaaatgtacaggaatgttctctgtccggaacttttctgtggtcagcacagaatgaagaaccctctccccggtattcctgatacatatctgaaaaagtaccctgtcaccaggcaccgctgctgtacggtctgccgtttttgtcacctggaaatctgcctttaacgcctgaatttctgtttttaccgtaatcgtacgactgatttcatccggcactgtctgcggagcttcctctgatgcaaagtcccccagatcatgatcttccttttctgtattctgaggatacgccctggctgtcagttcaaagcccacctcttctgtcctgtcttccggaacaggaatacagatataaaatatttgcttctctcccggcaacagcatcccggtattttcccagggagtttcctcaccctgctgatcttccagaactgctgtcagtgtgctgtccggctgttcacagaaaaagctgagattttccagaggaagcgtccctgtattttctgttgctatttcacagacaagcgtctctcctgccctggctgtttccggatttacttctgcggttaaaacaaagtctgctgtttcctcttccggcatttccgtgtcttcccctgttcccggctctgtattcggattttcttccgtttcttcatccggatcttgctcaggcttctcttccgggttctctccctcttccggcgctgtgccttccccgttttcttctccgtcaggcgcttccggtacctggtcctccggttctgtttcggactgcgcatcattatcaaagccatccccggacggatcctcttcttccgtttcctgaccgggcaggttctcttctgcctgtccatttccatcctgaatatcatttccggcttcgtccccgaaaagttcctcttctccggattcctgttcactctgcatacgaaattccccggaacgctttccccatttcactgacttttccacagaagtttcctgtgcgctatccggcagctgtgccagagtttcctgtgttcctgatgtcattacaaatccagccagtaaaattcccagactgatctgttttattttgtgccatattctttttttcataatattccctctttctgttctgcagcaaaaatcaacactggcttcctgtttccttttacctgttaaaagtttcccctgtcaatggcacctcccctttctgagttacattctctgtttttcgtattttcatctatggaactttgcaccgaacggtacttctgaactgtaacagctgctgaatatccccgaaacagctgtctgtgattaaggatccacagaactgtggactatgacagatttactgtaccatgctttcttaaaatatacaatgtggacttctaattataaatttaatttaatatttctttatattttttcgttttcttttagaaacagtacacactttgcacacatttctccgatataataggttttggatagatgaataaccactctctatctccccccccccctcaaaaagttaaggaaacgggccgtctgcatctgcaggcggcttttccttttgcaatcctctcttgcatttcaggccatgttcttttataataaaacatattaatgaaaaagaaatgaggtatccctatgagcgaaaaaactgtagtagttgcactgggacacaaagcgctgggaaccactctgcctgagcagaaaaccgctaccagagcagcggcaaaagccatcgcagacctggtagaggatggcgcaaatgttgtgatctcccacagcaacggcccccaggtaggcatgatacacactgcaatgaacgaattcggaaaagcacatccggattacaccttcgcgcctatgtccgtctgctctgccatgagtcagggctacatcggatatgacctgcagaatgcaatccgcgcagaactgctttcccgcggcatttataaaccggttgccactgtactgacccaggttgtcattgatccttatgacgatgcttttgcagagccggaaaaaatcatcggccgtgtcctgaatgctcaggaggcggaagctgaggaagaaaaaggaaactttgttacagaaactgccgatggtcagtaccgcagaatccttgccgcaccgaagccccagaaaatcatcgaactggaaacaatccgtactctcgctgaggcaggtcagatcgtgatcgctgccggaggcggcggtattcctgttctggaacagggagttgaccttcacggcgccagcgcgatcatcgaaaaagatttcgccagcggacttcttgctgaggaattaaacgcagatactcttctgattcttaccggcgtggaaaaagtaagcctcaacagaggtaccgatcacgaagagcttctgggagaaatttctgcagaagatgcccgtaaatacatggaagcagatcagttcgaaaaaggctccatgcttcccaagattgaagcaggcatctcctttatcgaaaaaggagcccacagacgcgccattattacagatatggctcatgcacaggatggctataaagaaaaaacaggtacaattattaaataatacataccgctgcaaggcagagcccgtttcggagttctgccttttctttatctgccaaaaaggattgattttatgtcggcttttactctataatattccatatacaaaaacagaaacggagtacccaaatggatctgaaaagcagaacactgtcaaattttgcagaacttgtaaaaacaggagaatgtaaaaaattcaaaggaagattaaaggtcggcgttgaccttggaactgcaaacacagttctggctgtggttgataccaccaaccgtcccattgccggaatttccgctccctcccacgccattcaggatggagtgatcgttaattattttgaatctgtacagcttgtgacaaagctgaaggaaactctggaagaacgtcttggtacagagctgctctatgcagcggcagccatccctccgggcgtgtctgagggaagcgtcaaaagtatcggttatgtgctggagggcgccggatttgaggtcacgaatattgtggatgagcctactgcggcttccgctgttctgaagatcaccgacggagccgttgtggacgtaggcggcggcacaaccggaatcagtattttaaaagacggaaaggttatttacacagatgacgaggcaaccggcggcagtcacatgacaatgactgtggcaggccattaccggatcccttatgaagaagctgaggttctgaaaacccagccggaaaaagaagcggaaatttttcctgttatcaaggctactgtagaaaaaatggcgcttattacagaaaaattcctgaagggctaccaggttccggctgtgtatgtggtaggcggttcctctatgttcacagaatttacctcggtgtttgaaaagcggctgcacctgcctgtttaccggcctgtacacccgcttctagtcactcctctgggaattgcatactgctgccagcttccggagctttcgtcgaaaaaagaagtgaaataaaaaatgtattcaattttgtgaaatcctttaaacactaggaaaactcccggcagccacactttttatccctgcatatttttataaatcttatcgaaaatctttcttaataacaacaaaatcccttccaggaagtatctgctcctgaaagggatcttttttatttaaaaatatttacatggattttctttctgcgatctccgccatttttgcttcgttcagtcgtgtatctccatgcacacggctgtaggaaagataaccgttcatacggtcgatctttgtaaggtttttggaaccgcataccgggcacacatccatttccagttcttcatggccgcagtcgtcacagtaagccagggaaaggttgacaccctcataatagccaagctccatagctctgcggatcagtgtacggatcgcctccttattatagccgatagggtagcgcacatactggatttttccgccgttgcacagttcccagaatctgccttccagatcctgtttctcaataggagtcacatcctctgttacatggcagtggaagctgttgcttacgtatggtctgtcagagacgccttcaataatgccgtacatcttacggaactgctctacctgaagtccgcagaggctttctgccggagttccgtaaatagcgtacagatatccgtcctcttctttaaactgatttactttgttgttaatatatttcagaacctccaacgcaaactgtccgtcctcacggatggatttgccgttataaagctcctgaagctcattcagcgcagtaattccaaaagaggctgtcatcggctttaagatcttgccgattttttcgtgaggcttcagatgtccgccgtagaatccgccttcacagtaagcaagaggattagtggaagcgcgcatctgccccagatattcataagtacggatatgcaggttccggatcatttccagataaaaatcaagaacctcataaaaatctctgctctccgctctggcttttgccaggatcataggaaggtgaaggcttaccgcacctacattaaagcgtcctacaaataccggaacatccttttcgtctgccggatacattccgcctctttcgtaccaggggcttaaaaaggcacgacatcccatagggctgatcacctttccgtactgcttatacatactggaaatataaccctttcctgacatggaaagccagtccggatacattgtctttgcagaacagtccacacctgcctcaaatacatcctcacagcactgtcccggtccatgaatattttcatcataaagaaatacgattttcgggaaaagaaccggttttttatgtccgtccctgccctgtccgcccttgtggacctccaaaagagaaatattgcacattttttcaaactggcctgttccaagtccaagagttaccgttacaaaaggataatctcctctggatgaacctactgtattcagcttatattcaataccctgccatccctggtcgaagtctctgcgcactttatccagcgcgtactcaatggctttttcttctcttccggtccagcttttgtctgagtactgcagaaattcctggacatatttatcatagctcttctttgcatatggagccaggatcttatctacttccggcacagtaaagccgccgtactgctgggcagccgtgctgagaacaatgtctcccataacgtcaaacgctgtatccagagttttcggttcattgtaccatacgtttcccatttcaaatccgccgctcaacacagaagcaacatcaaaaagacagcagttcatggtatccagtctggcagactggtcgtgaatataaatataaccgtccttgcatgcctgaagctcgttacggttcataaaaaatttacggtaaagttccttattcagttcgttaaaaatcagacttctctttgttgcaacaagggcgctgtccgtattggcgttgctcttatctccaatgtaacggatcgcctgactctttgtatatacatcatccatcatgtgaataaaatccagcttgtaattacggtaatcgcggtaactttttgccacagccggatttactctttccagagcgccttctacaatattgtgcatttcctggatctgaatctcatttttccccagtgaatccgcatgttcctgcgcaaaacggcagataaaatctttttcctcctgagagaatgtataaagaattctggctgctgacttatttactgctgccacaatcttctgcggattaaattcttcttttgtcccgtcttttttaattacataaatcataccatttttctcctatttagattcgcaggaaaccgcacatttattaccagtaccctccccgtcgaatccgttccccatatctggtgttgcaagagagagtatagcacaatataatgtaaaagaaaagggggtattttatttttttatttcccccttttctttctgttgatatcagctcaattccgggcatcccggtcagaatgtattccgaatcatctttaatgacagacgcttctattctgctctgctcagataaacgctgtcataggaattttcatactcatccagataaagcagatccccttcattcagggtaaattccacctcttcccctgttttcagaagatgaatttcttttccgcccacgccttcccgtaccagtttcactttttctttatttgtataaacaatatattttccgggctcaatttctgtccccacaaatgcctgtccatgacctgcgcttagcgcatactctatctttccggttcctgaatttatccacgaggaaagataggaatcatccgaaagctctgttatgtattctgtatctgtgtcaacaggcagaacttcctcatccgtgaccgtttcatacacataatgctccaagatatcattttgaagaatgttcttccgccatgtatcccacagaccctggattaccggcaaaaatatgatcagaaacgacaggatcagaaaaatcccctgatgttttttcttttttttcggttctgaggacagagtattccttttttcagaagcagatactgttccggtctttgcagtttttttatgcttctgcgctctgtaagccgtccggttcccggcagtgtttccggttgtcttacgctgcggctgaggctgctgcgccttttttaccgtttctgacggagccagtcttttctgaagctcctctctggctttttctgacgcatgtctgtcatgagtttttctgtcttcatttacatggtacagtaccgcgtcgtttttgtacggcattccacagcttttacatcttcctcccaccacagggccatcacataactgacaccgcatatcccgcctcctcttctctgtctccgtaacagatttttattcttttttccgtttatcctacaaaatatctgagttcattgtaccgaaatttctccgatcccgcaaggtaaaaaataacttctgccggttccgacccacaaaacgatgatgttcaaggaaccttccggatcaccttcggcaatggcattttcacagctgaggtcaataactataaattgcattgcacctgttttcctgctataatatggcttattaataagagcgcagctcgaacgaggaggaattattatggaacaatttaaaattcccgccggatatcattctgatcttaatcttcacgatacccaggtggcaatcaaaaccgtcaaagatttttttcagcagacacttgcacagaagctgaatctcctgcgcgtatccgctccggtatttgtagcgccgtcttccggtctgaatgataatctgaacggtgtggagcgcccggtcagctttgatattaaaggaatgaacgaaaatgcggagattgtccactcccttgccaaatggaaacgctatgcgcttaaaaagtacggcttttcccacggagagggactttatactgatatgatcgctatccggagagatgaagatattgacaatatccattccatttatgtggatcagtgggactgggaaaaggtgatcacaaaagaagagcgtaccatggaaacccttatcaatactgttcgttccatttacagtgttctgcgcaaaacagaaaaatacatggcagtacagtacgactacattgaagaaatccttcccaaagaaatcgcctttgtatccacacaggagcttgtagatatgtatcccgactgcactcccaaggaacgcgaatataaaatcgtaaaggaaaagggcgctgtatttcttatgcaggtaggaaaaactcttacagacggccagcgtcacgacgggcgggctccggactatgatgactgggaactgaacggagatatccttgtgtactatccggttctggatattgcccttgagctttcctccatgggtatccgtgtagacgaagaaactcttgatctccagcttacagaagcaggatgcaatgaccgccgtgatctgcctttccagaaggctgttctcaacaaagaacttccctactctatcggaggcggaatcggtcagtcccgcatctgcatgtttttcttaagaaaggctcacatcggcgaggtacatgcttctctgtggcctgaggaagttcttgcggaagcaagggaaaacggagtaaatctgctgtaaaaaatatatcttcatgtttttttcatagtagttttcaccaaaatttaatatttcatttattgacagcagagtaccttcatactatcatatcagtagaatcggcaacaaaaaagagcggcagttttttcatgacctgccctcacactgaaatgaaagacagaggtacacaacgtgaatattttattttttctgacacccaaaagtgaagtagcttatatatttgaagatgagacactgcgccagactgtggaaaaaatggaacaccggaaattttcctgtattccccttctcagtatggacggtcgttacataggaaccatttccgagggagatcttctgtgggggctgaaacggctgaataccatggatgtaaaggaaatggaggatatttccattatgactattcccagaagagccacctacaaaccggttcatgcagatgcagatatggaggatcttctggaccgggccattaaccagaattacgttccggttattgacgatcagggattttttatcgggatcattacccgtaaggaaatcatcaaatactgttataaagagctgaaagcagcctacgccgaccgccagaccgacagcccggcacaagaaaacaactaaaagaacccccggcatttatgcatatcacatcagcataatgccgggggctttcatttattcctgatatctttgtttataatacctttgacagaaaatccttcagtctctggttttccggatgagcaaagaactcctgaggtgtgttctcctcctggatctttccttcatcaataaacatcacacgggttgccacctctctggcaaatcccatttcatgagtaaccacaaccatggtcattccggtctctgcaagctctttcatgatctccaggacttcgcctaccatttcagggtcaagagcggaagtaggctcgtcaaacagcatgacatccggattcattgccagagctcttgcaatggcaattctctgcttctgaccgcctgataactggcttggataagcatctgccttgtccggaagtcctacacgttccagaagctcgtctgcacgtctggaagcttcctccttagtcatcagtccaagcttttccggagccagcatgatattttttttgatggtcaggtgaggaaacagattaaactgctggaacaccataccgatcttctggcgcattttgtcaacgtttactgatttatccgtaatatctgtaccctcaaaaagaatctgtccgcctgttggtatctccagaagattcagagaacggaggaaggtagactttccgcatccggaaggtccgataatagccactacctcgcctttgcagatctgtgtggaaattccgttcagaacctgcattccgtcaaaagattttttcagctcttttacatcaatcaatacttcacctttagcgttcactgcttctcagcctcctttccagttttcctaccagataagacaggaacataacaagaatcagatagattgccgcaactgccagaagaggcagaagcgcttcgtatgtctggcttcggataatatcaccgccgcgggtcagatcggtaataccgatataaccgctgatggaggtttctttcataagaacaataaactcatttgccagcgcaggaagtacattcttaaacgcctgaggaagaatgatcagcagcattgtctggcggtaattaaatccaagacttctacctgcttcaaactgtccctggtcaatagacatgataccggaacggacaatttctgcaacataagctgcagagttcagaccaaaggctatgatcgctgtgatcatttttcccggatcatgaactgcaaacacaacataatacatgatcagaagctgtaccattgccggcgttcccctgatcacagtcagatacaccttacagatggcattcagaatcttcatttttccggtcctgtcatgggtggaacggatcattgcaataataaagccaagtacaataccgatcagcacggcaaatgcagtaatgatcagagtggtctttaaaccattaaaaataaattcataacgcttgtcttctatgaaattcaatcgaaacttatcaataaattccgccaaaatattcaccactttctcttttatcagacatctttagctgctcataagaaattccgggttcccatgtcgatgctgtcgataccgggtgcccggaacttctgtgtctctgttgtctgtcatacctatgacaggcgcaggatctgttccattatttacgaacaataataacctgttttgcagttgtataagtatcagtaaagtttgcgttctctttacgatcttctgtaacagtcataccggctacaccgatatcagcctttccggaagctactgcattcatgatcgcattgaattccatatcctccactttcagctcatagccgagtttgtcgcagactgcctgtgccatttccacatcaatacctacaatcttgtcgccctcataatattcatatggagggaaagttgcatttgttgccattgtcagagttccgttggaacggtctgcatcttccggtgactcatacgggcaggtacctttcacatcgtcagatccgatatagttttcgttgatctggtcaagaatgccttcttctttcagctctttcagggctccgttaattgcttcagtcagctcatcattgcctttttttactgcaatggcatattcctctgtagcaaaatcctcttccaggatttccagatcatcgttgttttttacaaactcctctgccggaaggctgtcgatgataatacagtcgatcttgccctgtttcagagccattactgtatcatttgctttgttgaaacgctcgatttttgttccggcatcatcgccttcatactcgtctgtcacataagtatctccagtggttccaagctgaactccgatcttttttcctgcaagatcatcaatgctctcaactccgctgtcattggcagatacggttactgcacccatcatagatgcggtcattgctgcgcaaagtgcaagtgctgcaaattttttcatgtttttcatttttgtttcctccttaaaatagtatatttatacattctctttgcataaaatttcttcaaatcatgatttttattgtaccatgttttttgcaaaatgcaatagtttacttgcataataaaaaataattttctataataaaaatactttcatatgcacaaaaaatcacttttatacgcacaatcggtatttttataaggaggatatctatgggaatgaatcagacgcccgcttccgagcggatacatatcagttttttcggaaaacgaaatgcaggaaagtccagtatcataaatgcaataaccggtcaggatcttgcgattgtctcagatgtaaaaggcacgaccacggatcccgtttacaaaaccatggaacttcttccccttggacctgtaatgatcattgataccccgggcattgacgatgaaggagaacttggagctctccgtgtaaaaaaaagctttcaggttttaaataaaacagatattgctgttctggtaacagacattcatataggtaaaacccggtgcgaggaagaactgatcctccgttttcaggaaaaaaatatcccctggatcctggtttataataagacagatcttgcttctgaaacggaagctttttccactgctgattctatcaaaagtaattctgacacttttgctgcttccggcgaaagcgcttctccggcttcctcggaatccggaaaaacaaatgaaatctatgtaagcgcaaaaaccggcaggggcatccatgagctggaagaaatgcttgcttccctgaaacctgaagaaacgcataaatatccactgatcgcggatctgattgccccggaagatcttgttctccttgtggttcccattgacaaggcagcgccaaagggacgcctgatccttccccagcagcagactatccgcgcggttctggaaaaaggagccctttctcttgtagtcagagatacagagctgaaatccactctggaaagtttcagaaatcatggaatcactccaaaacttgtgatcaccgacagtcaggttttctcaaaggtgtcaaaagataccccggatacggttcctctcacctccttttccattctgtttgccagatataaaggagatcttgccacagtggtacagggcgctgccgctcttgacaacattcaggacaacgataagatcctgatcgcggaaggatgcactcaccaccgtcagtgtgacgatattggaaccgtaaaaatccctaactggatccgaagctatacaaaaaaagaaccggagtttgttttcacctccggaacagaatttcctgatgatctgaaggattacaaactggttgtacactgcggcggctgtatgctgaatgaaagagagatgaaataccggattgcctgctgtcaggatcagaacgttcctgttacaaattacggtattctgatcgcccgggtcacaggaatcctgaaaagaagccttgaaccatttcctgatatttataaactgatataaaatttctggaatttttattctgatttcacaaaaccataacattttatctctatacttgataccgttatccgggaatgagtataaatagtacataatgaggaggaactctatgaagtttacaaaaatgcagggtattggaaatgattatgtatatgtcaactgctttgaagaaaccattgccgatccttcggctgttgcaaaatttgtcagcgacaggcacttcggtatcggctctgacggtctgatcctggtcaagccttccgatgtggcagactgcgaaatggatatgtataatctggacggctcgcagggagccatgtgcggaaacgggatccgctgtgtggcaaaattcgcctacgatcacggcatcgtccataaaaagaatattactgttaatacaaaaagcggaattaaatatctggatcttgatatcaaagacggaaaagtctcctctgtaaaagtaaatatgggttctcccattcttactgcaaaaatgatccctgtcgtatcagacaaagaacaggtgatcaaccagccacttgacgtaaacggaactatctggaatatcactgctgtttccatgggcaatcctcatgcagttacctacatggaggatgtaaacagtctggacattgaaaaggtagggcctatgtttgaaaaccacattaattttccggacaggatcaacacagaatttgtcaaagtcattgacagacgcactctccagatgcgtgtatgggaaagaggctccggagagacactggcctgcggaacaggcgcctgcgcagtagctgtggcctccaccttaaacggcctggttgacgaggacgtgcctattaccgttaaacttctgggcggagatcttcagatcctctggaaccgccaggaaaatcttgtttacatgacaggcccggcaactacagtgttcgagggcgaaattgatctttcttctatataaaagagtacagaaacagtaacaaaacaagacggacacactctgactgagagaataaagtgaaatcctctcagcgagttgtccgtcttgttttttattctttattttgcaaattccgggcatggatttgtaatgctcacctttttatctgccacaaagatgattttatcataatttttaagctgaggcgaggatatatcatgggttatggaaatcagggttattcccggaagtttcagcagcttctcttcaatatcataagcgctttttttatctattgccgaagtcgcttcatccagaataagtattggtttattgtgataaagagcccttgccagcgcaattttctgcttttgtcctcctgacagattcattccattatcctgaatttcatcatccagtccccgctctgactgcttcaaaatatctgatacaccgctgaggtcacacacctctttcatgagctccggatcctcttttccgctcataataatattttctttcaccgtaccgttaaacagaaaagtgttctgtcccactgttgcaaataagcttagatagtcatggctgctgttatctacattcctcttatctatataaatatttcctaaagtctgtgtataaatgccatttataacattgatcaaagttgactttcctgctccgctctcacctgtcacggcatatttttttcctcgttctatttttaaatgaatgttatctaataccttttctccggtatttttatactgaaagcttatattctgtaaatccagctcccggaagaaatccatggtctgatcgttctgattggagaaatctgattcatgttctcctgtttccagtatgttcagaaatcttttttcaacagcttttcctcctgaaattttaggtagatttgtcataatattcatcagcggctgaacaaaagctcctgtcagctgcataactgccaccatttctccaagattcaaaacaccctgaaaaacaaattttgaagaaacaaaaagaatcagcaattctgtgcctacagataaggtcatagataaaacttcactttttgttattgttttgtccagcagctttttgttctgattataatctgcattggcagctccaaaatcctttaacgctttatgctgacagcaatacgtgcggatcacataaaatccttccagattattattaagtgtctgcgttaaaaaagaaagcttttctgaggcgatttcctgcaaagcagaaattcctctgtcaaacaagcgaggaaccatataaatcatggctgtacatccaataatcaggacagcaaccggaatatttgtcatcatcagcgcgcaaactacaattactgctgaaattacattttggataattaacagtttactccttaaacttccctcctggtatacctgaatatcgtttgtaagtatggataaataatctgctgttggacattcacgaaattccgaaaacgaaaacgacataaccttttttaataaatggcttcttaattctctgatatgatcgttaatcagtttctgcatataaaaatttctcagataatgaaacacgccatacatcatgataaaaataattgtgcctaaaacaatcttctcgaaatcctctgcctgttgtctgcttacagcattgatggttacttcaatgataaacgcaatagaaacagacaaaaccgctgtcaccacatttaaaatcatataaaccagaagtggaaagactggtatcttacaatattttttcattttttttaacatgccgttccggtatgccctcctcaataactggagaagaaataatagatatatttctcggcttcgcatctgcactttttttctccatgtattttctgcacagcctttcatactcatctgtaaactgcgtgaattcttcatccgtcagcaataagtaatctcttcctgcaaacagcatatcctcagaaggattcctgttctgatcactgtaatatttctggaaatcccataatagtgacagcaaaaatgtcacaatcccgctgaaatcattattcttttctgctttgtttagagcatatgttttttctaccgttcctctgattctgttttcatgtactacctgaatgatatgatttgactcaagtaattttatatgattatagactgacgcttttgatacctctggcagtacgcttattatttcatttgtagtcgcttctttataaacagataaatgctgcaaaattctcaaacgcaaaggatgtattaataattccgttttattcatatagattctctccttttattctttaattttctattattctatttttttataatattatactctaatatattatttgtcaactgtgttttctgaggtggataaaaagaatatttacaaaaagggaaatattcacagaaagtgggcttgagccgccccgctctatactcacccctcccctgtatcacaggaggaataaaaggtacagaagcggcaaacagaacaagacggacacactctgactgagagaataaagtgaaatcctctcagcgagttgtccgtcttgtttatatcttatagattttatgtgtaatcagccctgctgttcctggaatttacggtattcttctacgggcatgtccaggcctgtatacagcttataggctgccgcgccctgccacaaaagcattcccctgccgccaatggttttgcagccggcctcctttgcttcacggagaagccttgtctcctcaggattgtagaccacatcagccacaaccaaatccgggcggaacatactcttatctgtgatcagggtcgtgtcttcatggggcttcatgcctgccagagtgccatttaccagaatatccgcctgggcaatttcttctctcagtctgttttcatcatccaggcagaatacctgaaccttacattccggagcctcttttttcagcttctccgctgtctgatgagctctctcaagaaacggatcatcaggattaaaaacagaaatagaagcagctccgtcaagggcgcactgtacctgaatggctgtagctgctccgcctgctccaagaaccaccattttctttccttttacctcaactccatgctccttcaggttctgtacaaaaccagttccatctgtaatatgacctacaagcttcccgtcctcatttacaatggtgtttactgctccaataatccgtgctgccggtgaaagctcgtctaccagtcttgcagcctcatttttgcagggcatggtaacattggctcctctcatcttaaaaagccgcatggcatccaaagctgcgcctacctggtcttccttaatatcaaaagccatatatgcataatcctgtttatgataccggaagctgaagttatacatatccggtgaaccggaatgtcctaccgggcttccgatcagcatcataagtcctgttgttccctttattctctgttccatatcttctgtcctcctgccattttctgcaccagctcttcacagatttcctgagtgcttttttcgtctgtctcaatgatcagatcagcagcagcctcatatttttcgcggcgtttttccatcagctcagaaatataggaaactgttttatttccctccagaagcggccggtcatggctatcttttacccgctccagaatcgtttccggtgcagcggtaagaagaaccacgcatccgtttttcttcatttcctttacgtttctctctctcatgggaacaccgccgccgcaggaaattactgtgttggtctttgcctgcatttcaataagcagatttgtttccagatcccggaaatattcttccccatgcactgaaaaaatatcggaaatgctcattttttctctttctgcaataatctgatccatttccacggtatccatattgtattttctgctgaggtattcagaaaccgtactttttcccgcgcccataaagcctatcagaacaatattacaggaaaacggcttattgtgagcctgctgcgtttcctttaacaaattttctttcattcattttaccttccgttccttattttcccggtatcctgtgacctgcttatgcccaaacaggtataccattttcttaaagtataacacttacgtatcactttaacaatataaagtgtaaaaaggttctgtctgaaagcttacacactctcagacaaagactttccacttattttatattatcccagaaatccaagaatctgctctgccacaaacactgccacgcaggcgcagagagctaccgtaagaagacttttttcccggtatgctgcgatcagagcagcgccaaggcctgctgccccggcaatcattccggaagacggcgcggtaagtatggccggaaatgtcattgctgccagacaggcataaggcacataaaataaaaaagacttcacaaacggacttgtaatctcctttttaaaaagcaccagcggaagcatacggatcagataagtaactcccgccataaccagtatataaacataaacactatgattcatgagtttcctcctctccgtcccctataggacagaaataagctgcagccccggctacgatcagtgttgtaaaaataatcacaaagccggatgatatcctgttcagcaccggaaccactgcaaaaacagcgctgatagccatggctcctgccactaccgcccgtaccggtctgtgtttctttgccggaggtatgatcagcgccagaaacataccgtaaatagccacgctcaaagcgctggacagaaagcccggcatgatatttcctgccattgcccctacaaaagttcccagtgtccagcccggaatcgctgcgcacattgccccgtagtgataccaaggattcagttttccacttcggcttatactgagtccaaagatctcatccgtcataccaaaagccacaagaaatctgtgccctgacggtatatttttctgcagcttctgagaaacagaaaaagacatcagactgtatctcagattgatcacaagctgcgtaagagccatttcccacagagaaccgcaggcaataataatctccagacctgcaaactggcctgccgaggtaatattggtcagagaaagaagggttgcctgccatacagacattcctcccgcaactgccatcattccaaaggtaaaggatactgcaaaatatcccaaagaaacaggaaccccatcccggagtccctgcatgaactgttgtttatttgtgttctgttccattgtatctccactcctcatttatgtatgattatacatttttccggtggaattgtaaacagaaattttttgtctgcataatgtgtttttgcgtattttttcacaaatcttctgtttataaccctgataacagaagtcagatattgctgctccttccgttcccggtaatccggtcagaatatattccaaatcgccttccgccatgacattttgccctgtattaaaattatacaatgtataaaaatgcaatattctttataaaacgctccttccggaagcgttctttttccgttgcggtacacgccagaaacgtgtatactgataaatgaaattttattcaccttttttacaggtatacactttaaggaggttttccatggaagaggaaatcattgaaatcaatctctccggtttttgccgtacctgcaacagcatgcagactgtcacctgcgaatatattcccaccgaaagcggcaggaaactggatgttatgaactgcgcccacaaaacctgccgtcatcatgcagcctgcgctatttaccgggaagcccatgaaaacgagcagatatgaattctctcatatctgctcgctttttccatctttcctttactctgctttttccaaaatcctgtaataggatcttgctgtcactgcatagatcacgccatagactgctgcaaatataatcactgttactgccgtacatataagaaacagcctggtatttgacatgcccaccaaaagaagcagccttttcatcaaaggaaatgccattccaatatggacacatgccgtaatcagcggaaggaaaaataccataagaatctgtctgtgaatcgaggcttttacttctctgcggctcattcccacttttctcatgatctcaaaacgcgccttatcctcatacccctcagaaatctgcttgtagtaaatgatcagcgctgttcccataaggaacactccgcccaaaaggattcccacaaacagcagtcctccattcagcccgtaaaagttttctccttcctctgcataagaacgactggaaacataatcctgttcctgagcaaaatatccctgctctttaaacttctgaatactgtcattcagcatctgcctgcacttaatggctgccgcatcatctcccggcacctgaactccaatgctggatgtaatggaatatccgccgcccttcgcttcattctgcaactgattgattttttcaaaggttttttcatctgctacaaagtacagagtttttacaaaatccatactcagctgacctgagatctccgggcgctttttcagtctgccggatattttaaattcctggttctccagaataatgctgttttcttctgttccgtaagccagaagactgccttcaggcacatcctgcttttctcctgtcacctgttcactgaagctgtccggaataattaccagcgttgcaatattctgtgtctgtgactgtcctgcttgcggatccatatttaaccggtttccttccataacgcctatgagagaaagataaatctgagactccacactttctaccggaatatttttttcttccagttccgttcttataaactcctgcgccatatacgcttcttccggagaatgtccgtggaaatccacatttacgtcacaagggtactgagaacggatagtatcctcgattcccatattcaggcttaccgtagtagacagcatcagaagcactcctgtactcagaatacagatgcttgcaagacctaccgcattctgtttcatccgatagagcattcccgagacactggtaaaattctgaagcttataataaaacttttttctcctgcgcagcagcttcaaaatcacaatactgcctgaagtaaataccagatatgttcctgccataacaagaaggactgctataaaaaagactcccagcgcatcaataatcgattctgtggtaactgccagataatatccggttcccagacagccaaatcccgcaatggccataaaaagcttgctttttggttcccgctctcctgcattgcctccggacagcagttctaccggccggctgaaatgcacccgcctcagattattaaaaagtgtcagtacaagaatcactccataggataccgcacagaccttgattcctttccaggaaatataaaatccaaactttgcgggaatacgaaggattttcagaagaagcaaaagcgccagcttacttccaaggattcctgccgccagtcctcctgccaggctcgcaatacctgtgaacactgtttccacaagcatcagatgactgatgtgccttttttccataccaagtacattgtaaagtcccagctccttctgccttcttttcatcagaaagctgttgcagaacagaagaaagatcactgaaaaaacgccgagaataaagactcccatgctcacaatggctgccacatccctgccgcctctcatatttacagtgtccgggctggtgacaataaacatcatgatataaaggactgcaatacatcccatacaggaaagcatatacggaatataggttcccctgtttttcttaatattggtaagcgcaagtctcagaaacatccctttacgcataagcctcaccgcctgtcatcagaactgtcagcgtatctgagatcatctgatacatttcctgacgtgatttcgttcctctgtaaatctgatggaacacttctccgtctttaataaaaagaactctggaggcatgacttgcggcctgggcgctgtgtgttaccataagaatggtctgtcctgcatcattgatctccccaaacatggacaaaagagaagctgctgctctggaatccagggctcctgtaggttcgtctgccagaataatcctcggatctgtgatcagagccctcgctactgccgccctctgcttctgtccgccggaaacctcatagggatatttctccaggatctctgtaatgcgaagagcctttgcaacaggccggatcttctgctccatttcacggtaatcctcccctgccagcaccagtggaagataaatattgtctctgaggctgaacgtatccagaaggttaaaatcctggaatacaaatcccagattatttctccggaaagcggaaatctccttttccgttaaatggacaatgctttttccatcaagaagcacttctccctctgtaggacgatccagagacgccaggatattcagaagcgttgtttttccggatccggattctcccatgatcgccacaaattctccgctttctacagaaaaagtcacgttggcaagcgcctgaacctgatttcctccaaatcgcgtactgtatattttctttacatttgttacttccagtaaagccatgattctgtttcctcccgtcatacgcgcccctttcacttccatatctgacatttcctgtgtgcagcgcgcagttttattttgtaacctcagtatacagaaaagagaaaccgtatgccataactttggcttacagtttctctctgtatgtgacatttttgtaaggttgacaggaattacatagcctctaattccggagtagctctgaaagcatttctttttcggtccagaattacctgtttttcacttccagaatcaagaacaatattttcctctgacttttcttccacaagaacatgcactacatcaagctttctgcgtctgtctctgcctgtaagggcatttacctgtgctgcaaaacatgcctccgatgcttccgcatccaattctgccattgcaacaatatgattagaagcaatgtagttaccgtttccggaaatcagccgtatgataaccggtcttttgtccgccggttttatcgactccaaagacactgtttccgaaatgtgattagcaataatggaattattactgccgctgattctgagaataccaaactgatcatccagaccattatccacaccgatcagcggtgtccacggctcattatcccggagaaaatgattagaagaaatcatattttccgaacatgctccttcaaacaccagcattccaggataaaaaccatgaaatctgtttcctgtgattgtagatttcgccacatctttaaaggtgacactgctggttccacggggaaaaatattgttggcattaatcaaaaggcctccaaaattctgtgcaaatatcgaataccccttatatccggctcccataagattatccgtaatctttgaggcctgtccccagcctcgaagctcaatgcagttgccacattccgcaataaaattatcatgaatggataatgcatctgcatgataaactgtaattccatgttccagatacacaaatcccataccggtaatcctgaacgagtcctgggcgcttccaacataaattcctgtttttccatttacatatgtattttccacattgtcaatatcagttccatcatccacaaaatgcagaccgtcaatacagaaattttcaaattccacagagctgatccggggatttccttcacgcttcacataaaatgctgctccatctttctcatcatcctctggatttacatctaagtctacgagaatacggcttccgcccggccagatctcatgcagatccttccactccttttccggaagattataacggatactggaagatacaaacccatggcctgttcccataatctttaaatagctgagatcaatgaccacctgagtgcgaagatgataatcccctgatggaataaagattactgctcccggttttcctccttcacaatgatcagaatcagactgtctcctcttgatatctgctataatactattaagaacttccccaatatcttcatatggatttcctgtatcccaatttgtcacatcataataatttttatcgaacattcttaaaacctcctgttccatactcctcatctaatctaagacaattttaatccatatgtttccagaccggatatcactgctttcccaccatacgcactcatgaagatctgattctgttcatctgatgcaaatacattattggaatgattattactgtactgatctgcaaaaatttcaaccgaactgcaatccacaaaaacatgaacatccagttcatttttttctttcaggtttaatatacttctagaaatccctttgctccatccgtctccaaaatttctgtccacactcatttccccctttttcaggtcaaaaaggcagactgtattttttccgtctccacagcgcagctttatctctacctgatctgccgtggtttcctgcaaatccagattaaactttatttcataacagattccatcaccggctttaatttctgtttcctgctcttcaagcacaaatttttctttttttattggattcacacgcagattttccagctcttttacaggaacaaactgaagtaagccatctggtttctttcttacttcccttggaagattaaaaaatccactccatccctctctgtatgacggtccccagtccttccataacggcatccattcccattcattcgcccaggcaaccataattcttctgccatccattgtttcaaaagattgtggagcatagtaatccagaccccagtcaatttccttacttatataataatcaaattttccagtttcatagtcaaagtctccaaccatatacacagaggtatgatctcctgctcccataggggagaatgtcagaacatactgatctcctgcctgaaaaaagtccgggcattcccacataaatccccactctccacgactttctgcaagtacattaaaaaatgaccagtgaagcatatcttttgatcggtaaagcagggcaaggcccttgttatcccgacttgcgccgcacaccatatagtacgtgccgccgtgtttccatacctttggatcccggaaacagtctgccttaatctctttgggagctctcaaaacaggatttcccccatatttttcgaaatggattccatctgtactgtatgcaatgcactgagtctgttctactccatttccattatttgccgtccctgtatacatcaggaacagcttatcttcacagacaatggcgcttccggaaaagcatccgcccttaggataatcatcatatgactcacttggagcaagagccaggggaagatattcccagtgaaccagatcttcactgaccgcatgtccccagtacatacagtcccaaaatgcaccataaggattacactgatagaaaaaatgatactttcccctgaaacagatcagtccgttcggatcattcatccatcctgcctgaggcataaaatgatactcctgtctcatgcttcctttgctgacaagctctttttttctgtctatttcttcctgagctctctggatatttaactgcattaaatttctttccataacctgctcctgtccttatccttttactgcaccggcagtcattccctgcacaatatatttctgagcagccagcgaaatgatcataaccgggaaactgaatagaaatgctcctgcacacataggtcctaaatcaagattatatgctgataaaaatcctgccaggcctacagtaaatgttttggcatttgtgctggtcagaagaagagcaaccagaaaatcattccatgcaagaaacagagtgaaaataaatgctgttgccagtcccggcttgcaaattggaagaatcactctccaaaaagtctgcaaactgttggcgccatccatatacgctgcttcgtccagcgtagtgggaactccttcataaaagctcagcatagtccacataacaaatggcatgttaatggctgcatatacaatgatcagtgcaatttttgtgtcataaagcccaagattacagatcagttcataaatcggcactacaatgctagacgtaggaatcattttcagacacagcaccaaaacgattaacagaactgacagctttgcgcctgatctctgaatagcataagccgcaagagaaccaaggatcagggcaatgattgtgctgataagagcaactgtcagactgttgaacaaaaacttcatcgcatccattctttccaacagtccggaaaagttttcaattgaaaagaccttggggaaaaatttcggcggaactgcaatcacctctgaccccggcttaaatgcacagcaaatcacataaatatatggaaagagccagcccactgtaagaatcactgacagagcgattccaagcttttttcctgtttctccttttctcttcactattttcgcctcctattacactgattagctgttctttttctttggattccataagctctgcataaagaccagggtaaatacaaccaaaacaacaatgaatacaactgccatagcgcttgcatagccaatatcattgtaccttgtcaaagttttatagatcataatactgatcgtttccgaagaactgttaggacctccctctgtcatagcccagataatatcaaaggttctggcagcatctatgattcttacagacaaagcagtcagcaaaactggtttaatcacagggagtttgatataaaaaatctgctgcagaagatttgcgccatcaatttttgctgcttctgtcatactggaatcaagtccctgcagaccagccagtatcatcagcatcataaaaggagttgtcagccatatatctgcaatacagcaggcaatcagcgaccatttttcgtctgcaagccataaaatgtcgctgctgctggataaaattccgatccgcgccagaagctcgtttactattccaaagctggagctcatcattaatttccaggtaagtcctgcaactaaaggcgcaatcataagaggagccatcataaaggaacgaataatcttgcttcccttataatccatttcaaaaaacaaagcgaacagcagtcccagaagcgtctccacaccaactgcaatcacaatgtacagcaatgtattctttaactgttttaagaatcctcctgctgtaaatgcccggatataattatcaagccctacaaatgtcctgtctcctgtcagcccaatatcaaaaaagctgtctgccaccatggttataattggatagatcagaaacgcacccataaatatcgcgcctggcaggaaaaataataataaggttttctttgaaattaatttcataccctttaccaccttttcgtacagggaaagtctcccctgttacattccgattgcttcaatttctgtcctggcagcttccagagtctcctgtatatctgcgcctcccagacaagattctacaacaccagtaagaacttcctcaatctgtgcccaggttgtcaccataggtcttgcctgtgtctgttctgctcccagagtttcgagaactgcagttgtatgctcatttccttctgtttttccggcttcctcataaacagaagttcttcccgcaatcttcagggtaagatccatgtaatctgcattatgatcatacataaattcaacatatttctgtgccatttccttgttctcagaatttttcatcacacactcataccatggacctgtggttgctccgattcctgcttttccggctatcatcggcgcacatcctaccttgtccgctcccagtgcttcaacagctgccggatactgatggctccagtttaactgcattgccgtttttccatttgtaaaaagctcctgagactctgtggctgctgtggaaagagaatctgacggagtataatctgcccctgcagtatccaccataaactgcagcgcatctgcataagcctggtcagtgatgtttacattaccatctttatcaaatacaagcccctctgctccggcctgacatgcgaaatccaggaaagaacatactgcatctgaaccgcttccaaatactgtagttccatacatatcatctgtttttaattcttctgcaagagactgatattcttcccaggttttcggtactttgtcctctggaatcagatcctttctgtaaatcagaatcttagaatttacccacatgggatatccaagaaggtttccatcaatagttccgctttcttcgagagttggaaggaaatcgctgctatctgcatctttaagcggttcaatagcatctgcaaaagctgccagccatactacatccatacacgctacatcatgggctgcctgttttgccttgatctctgtagacaatttatcatacattcctgtataggcaactgcatctacaataacctcacagcctgtttcctctttaaaatctgctgcagtttcctttgcaagggcctctgccggagatccgctctctactaatacagtgatactgtcttttttatctgctgttttttctccttcagtgcttccacatcctgtaagcatagttcctgcaactgctgccgccatcaccagacttaaagctttttttttcatgttaaaattcctccttttcgcttatactttccattccttttgatggactcattatagttcatctgtctttttatgtcaaacgttttcataatatattttcatttatgtcagtgtgcacaatattatattgtatattttgtatagttttaccgatatatttgtcattttaataagctatatcaattctttttcttctttgttatgaaaatattttcatattatatcagtgttttttcttttatttttcatgtaattatgttataatcatactatcaagaaaatatttccagcttcatgacattcgatattttaataatgtgaggttttattatgaataaagtcaaaattacagatattgcacaaaaaagcggtgtttcccttactactgtttccaggtattttaaccatccggagcttctttcaccggaaacacaaaataaaattaaagaagcgatcaaagatcttaattacagccagaataatcttgcccgtattcttgtcaccggtcagtccaatctggtaggcgttatttttcctcaccttcatttaagcttttacacagaacttcttaatcagcttgtaaaatacggtaaagaaaaaggctacagttttattatctacacctctaataactccaaagaggaagaaatgcatctgatccagaacctgatctcctaccggatcaaaagtcttattttattaagccatcttctttctccccaggagatcgaagctcttcctgtaccggtaatttcaattgaaagagccggaggaaactttaagcagattaacaatgataattttacaggcggaaagctggcagccgatttgctgatccgcaacggctgtgaagtttttatccatattaataatgatttcagggaagactggccttcctttaagcgtatcctgggatttgaatatgaggtcagaaatcttccctatgagcgttttatccagactgatcttacagatccttatatgccctctgccacaaaagcaatggaagatctggttactcatattaccacaaaatatgccggcaaaaaactgggcgtgttctgttccaatgatgacattgcagggctctttgaacgccaatgtatcaaaaagggaatctcgattccggaaacagttgagctgatcgggtatgacaattctcccggctccaacaatgcaatcctgcccatcacctctgtcgatcagaatatatccctgatggcacagattgcaatccagtctctggacaattatattccatatgaaagcatggttcctgctgccctgattgaaaaggaaacaaccagccgttcccctctgtaactttcacagcaatttacagttattttcattgttccatattttttacaaaaaaagagcgcaccacatgctgacatgtgatacgctcttttttcattcttttaaaacaactccgccctccggcggccaaggctcagataaactcgtgttccctttcccggttctgattccacggaaataccatgatccagccttttcatgatctttctggaaaggtacaggccgattcctgaggatctggtctccgttcttccattatatccggtaaatcccttttcaaaaatcctcggaagatcttccgcgctgattcctgcccccgtatcctcaatcaccagcgtatggggacgggattccgaaagataaatccgtatctcacctgtctttgtgtactttaaggcattggaaatacactgcccgatcacaaatcccagccatttgggatctgtcagaaccttttcctgtgttctctcatagtcaagctgcagctttttcccgataaaaactgacgcgtatttgtgaatctgctcccgaatgatcttatccagatcgcactctgaaaatttcatatccgaagacatatcctcagatctcagataccccagaaccatttccacatattcttctacccgaaaaacctctgcaagagccgttttattttcctgaggctgttctccaagaagcagtctgagggcggcaataggtgtttttatctgatgcacccacatggtataataatccgccatctctctgtaagaggtcatcctggcttcctctgcttccatcctcattcggttcagttcatggatcatctgctgaagcgccgcctcgttgttgtcctggggcaaaggaagcttttccagatccagaggaatactttttgcaatctgagacaaaacctgcgctttgctgcggaacctgaaatatccatacacaaatgctcccgcgaacaaagccatacataataggcttccataaagaaccggctcatcaggacagttatacagccataataccattgccatgattccggttgaagccaggaacaaagctgctgttttccatatttttttcagataccctgccatttctgtcctccgttactgcactatgtagcccagcccttttcttgtgagaatcatattttcaaggccgattccttccagcttgcgtctcaggcggttgacatttactgtcagagtattgtcatctacaaaatcatcattttcccagagcatctgcataatcgcttctcttgaaactacgtttcctgcctgagaaaaaagaaggttcagtatccgaagttcatttctggtaagctcaacggcctgtccctgatagctcagatttccgcttcccagattcaggacagcgcctctgtgttccagaagcttcccactgtttccaaaggaatatgttcttctcagtatcgcctgaacctttgcagaaaggacctccagattaaagggcttggcaacaaaatcgtctgctcctctggtcattgccataaccatattcatgtcatctgccgcagaggaaagaaaaataacaggaacctgcgatacccggcggatttcttcacaccagtgaaatccgttaaaatacggaagcttcagatccagaagcaccagatgggcttcggaacgcacaaattctcccataatatccctgaaatcctccgctgccgttacctgatatccccaggattccagatgttttgttatcagagaacagagcatctcgtcatcttctgcgagaaatatcctgtacattaaagctcctcgtccacatacttctgtatgttggatgcatttacatattttttcagatgctctccgtctgtgatcaccagggtaggcgcctgcataatgccgaactgtctcgccatatccgggttctgttctgcgtcaatgatctccagctcctcgccctccagcatttttttcgccatgcggcagtttgggcaggtgcttgtggtaaacaggtatttatgggtttctacaggctgtacctttacgtcgtcctctgtcattgtgactacacttgtatggacttttttcagggaagaatgcacaacgtcataaagggttctgtttttatattcctgagcctttccgtcattccagttctggaccggacggtaatagcctgtaatacggctgtatacctcagcctttttgccgcatttcggacaggtaaagtgctcgccacttaaatatccgtgctcgctgcatacagagtaagtaggagaaatcgtataataaggcagcttataattttctgcgattttccgcacaagagaagcggcggccttccagtcaggaagcttttctcccagaaatccgtggaatactgttcctgatgtataaagggtctgaagctcatcctggatatcaagagcgtcaaaaatatccgaactgaattcaaccggaagatgagagctgtttgtataatacggggtatcgccctcttttcctgctgttttaatgtcaggccagcgttttctgtcatgcttggcaagcctgtatgctgtggactccgccggtgttgcctccagattaaacagctcgccctgatactgctcctgataatcggagagccggtttctcatatgctccagaacttcttttgtaaacttctgggtacgctcatctgtcatatcacagcccagccatcttgcattcagccccgcctcgttcattcccacaaggccgattgtggaaaagtgattgtcaaagcttcccagatacctctttgtgtaaggataaagtccctcatttaaaagtctggagatcacctgtctcttgatatgcagagatcttgccgcaatgtccatcatatggtccagtctgcggtaaaactcttccggatttcttgactgataggcgattctcggcatattaatggtaaccacccctacagaccccgtgctttctcctgagccgaaaaagccgccgctttttttgcgaagctcacgaagatccagacggagacggcagcacatgctgcggatatcacttggcttcatatcactgttaatataattggaaaaatacggcgttccgtattttgctgtcatttcaaaaagaagctgattattcagagtatctgaccagtcaaaatcctttgtaatggaataggtgggaatcggatactggaaacctcttccattggcatctccctcgatcatggtttcaataaaggcgcggtttaccatatccatttcttttttgcagtccttatatttaaaatccatttcctttccgccaacaattgcaggcagctctgccagatcatccgggactgtccagtcaagagtgatattggaaaacggagcctgtgttccccagcggcttggagtgttgacgccataaataaaggattcaatgcattttttcacctcacggtaagacagcttatctgctttgacaaagggcgcaagataagtatcgaaggaagaaaatgcctgagctcccgcccattcattctgcatgatccccaggaaatttaccatctgattacagagtacgcttaaatgctttgccggagcagaagtaatcttgccttcaatacctccaagcccctcctggatcagctgttttaaggaccatcctgcacagtagcctgtcagcatggaaagatcatggatatgaatatccgcatttctgtgagcgtctgcaatctcattgtcatagatctcagacagccagtaattggcagtgacagctccggaattgctgaggatcagacctcctactgaataagtaactgtagagttctcttttacgcgccagtcctccacctttacataactgtttactatttctttgtagtccaggatcgtggatttcatatttcggattttttccctctgcttgcggtaaagaatatacgcctttgccacatcgctgtagccggcctggatcagaacgttctccacactgtcctgaatatcctccacagtgaccctgtcatcctgaatcttatcctgaaaatcagctgtcacacgcagcgacagaagatcgatcatatccttgctgtaattcttttcttttgcatcaaatgctctgctgatagcagacgaaattttagccatctgaaattcagcaatttccccatcacgttttactacctgaaacataagtccttcttcctcccttgctttgctcgctcttattttctgctgatagattacattgtagcaaaggtcacaggttccgtcaaccgcaaaaaccaccatatattgtgcgatcatacctttcacactctatatgatggttctgttttcctgtatttacaggctttccggtgtttttcaaaacccggaaatttatttttttatacaaatgtgacctgccttgttatccaggacagccaaaattacagcgctcctgttacaatcagccccggggcataacattcacaaaaaactctgcagggatttttgcctggacaaaaattccgtcctctctgtattcctcagagagaagctgtccgtattcccggatcatctggatttttccggcttctttataagcatacagctcctcaatataaatctggctttctgccagaagccgggataacagctctcttaactcacacagtcccctgcctgttctggcagaacattttaccgtatagtctgcccgcagatcacgcagctctgaatcaggcacaagatcctgtttattcagaagtgtaatgatcttttttccggaaacacccagctccttcagagtttcataaacaacctgcatctgcgtttctgctctgggattggaagcgtctaccacatggatgatataatctgcatattttgcttcctccagagtgcttttaaaggcttccaccagatgatgaggaagctttctgataaaccctactgtatctgtcagaaggatctgctgtccgtcatcaagatccattactcttgttgtgggatcaagggttgcaaaaagtttatcctccgcctgcactcctgctccggtgagagtgttcagaagcgtagactttcctgcattggtataccccacaatagcagcggtcttcagtcttccctttgatctgctgccgcggatcagctcacggtgtttttccacctgtaccagctccgctttcaatgccgagattctggtgcggataagacgtctgtccgtctccagctttttctcgccgggtccccttgttccaatacctccgcccagtctggacagggaatctcttaatcctaccagacgtgcggaccggtaacggagctgagcaagctccacctggatcttgccttcgctggtcactgctcttcccgcaaaaatatccagaatcagcagcgttctgtccataaccttacattccagctcccgctccagattattcagctgcgatggtgaaagctcatcatcacagataattccgtttgcatcaagagcagtcaggagatttttcacttcctgaattttgccttttccgatataggttcccggatgtactgcttctctgttctgaatgacctttgccgcagtttctgctcctgcagtttctgccagctcctgaagctcgtccagggatgcctccacatcatctccgatatcagtctgaacgcctaccaggatcacccgctcctgaatttccttaaaatcatacaactgcatatcaaccctcccaggatgtctgttcttctgccgaagctgtgtcctgtccttcttccggggcaggttcctctacattttcctgcgcgatcctggactggagaaattccagttccttctttgcttcctggtcatcgggatacattttcatatactcctgagcctttgaaaaagcggtgttaaagtcaagctgtttctcatatgcaacaatttcattaaataaaagctcctgcatctcgtctgtatctgcagcctcaagtccgctggcaatatttaccagtgcgctctgataatctccgtctgctatatcacacagagccagcccgttgtatccctctgccttacggctttcttctgcgttcagataatcctgatacatggatctggcggcagccgtatcattctgtgcaaggcataccattcccagtaaagaaagtgcctccacactgcccttttcggaagcctttgtcagttcgttcctggcattttcataatcctgcatatagtaataaatacgcccccgctcgcagtaatcttctgcattcccgggctcagttttcagaattgcttccagataccgtgtcccgtcagcctccatgcctctgctctggtaggcttcgtaaatctgaagagccatgtcataatcggctttctctccgtatgcctgttcaaaatttgatgccgcctcatcataggcatccattgcaagcgccacacagcctgttaaaaaatacagatctgcattcatggaataatcagacgccagagtctgacagtctgccatggcgtcatccggaagccctgctttcagctgtgcagttgcacggtatgcaagcagatcctgccttatggatttttttacccggttctgtgacagcgcctgagtaaagctctccacagctccctgataatctcccaggcgcagttttgcgattcctgcgcctcgtagagattccactgtcttatagctgtaggaaacagaagtctcataacctgtcagcgcttcctgataacttccctgctccagattttcttctgcctgcttataagtattctgtttttcacttccgcagcctgtaaggagagacgctcctatacagactgccagtatccgtccgatttttcctgttttcatgtatatcctttttattctacaataagcccttcggcttcgatcacctttaccacattgtccacatgttccgcacagatatcttctgttcctgcttctaccataacccggatcaaaggttctgttccgctttctcttacaagaatgcgtccgtctgtgccaagggctctggcagctgtctctacagcctcttttacctttggattttctcttgccgccactttatccgcaacacgtacgtttctcaggatctgcgggtaaaccttcatctcttttgcaagatcacaaagagtggtctttttctccacgcaggcctccatcagcatcagagaagtaaggattccgtctccggtggctgaatacttgctgaatataatatgtccggactgctctcctccaatactgtaattgttttccagcatattttccgcaacatatttatcccctactgccgtctgctcatagctgattccctcgcgctccagagccttataaagtcccatatttgacataaccgtggtaactactgtatttccgttcagccttccctgctctctcaggtatttgccgcatacatacatgatcttgtcgccgtcgataatgtttcctctgtgatccactgcaatacagcggtctgcatcgccgtcataagcaaatcccacatccaggcctttttccacaacaaatctctgaagcacctcaatgtgtgtagaaccgcagttggtattaatgtttgttccgtccggctcattattgatcacataggtttttgcccggagagcgtcaaacacacttttggcaattgcagaggaacttccgtttgaacagtccagacccacacggatgtttttgaaatcacggcatggaatagagatcagataaccgatataacggtttcttccggaagcaaaatctactgttcttccaatatcctcgccggttgccagaggaagctcttccagctttccatccaggtaagcctcgatccttgcctctacctcggcttcgatcttctgtccgtttccgttgagaagcttgattccattgtcataaaaaggattgtggcttgcagagatcatgattccacagtcaaaatcctctgtgcggaccacataggaaacgctgggagttgtggtcacatgaagaagatatgcatctgctccggaagctgtcagacctgccaccagcgcgtattcaaacatatagctgcttcttcttgtatcttttccgattacgatcttcgccttatgatcgcgcccgtaataccagcccacataacgtcctactttaaaagcatgatctactgtaagctgcacgtttgcctcaccgcgaaagccgtctgttccaaaatattttcccataataattcctccttgaagtccattgtgccgacacaacgggaaactgcttatttataaagtgtctccggataaacgccctcttttgcaagtctgtcaaaagcagcgatcaccacttctttgtcttcctgataggtcaccccaaaccaggtatcctttgtatccagtacatcaacctttgcttttccttccttgatcagacggtcgatcatctccggcagaagatattcttttttgatatccgcagcatcaagaccctgaagaaattccacaaagcctttttccagcacatccataaatgcaggagtcaggccccacatattcatggaaacaaggctgtttacatccagctcttctgctgttccgtcagcgcttctggactctgcgccgttctcagtcttataaatgtcatgagtctctgtcacgccaaccagcgctccgttttcaatgtggcagacgcctctggttacgcttccgttatcgctgagggtatttccaagacggaatccggccatacagatatgaagaagtccatcctccggctgcttctgcaccagatagtcatgtacttttacatatgcttcttttccataataatcatctgcattaattaccataaacggctcggacagaacattctttgccgcaagaactgcctgacctgttccccatggctttgttctgtcagccggcttctcaaagccgtccggaagatcttccagtgactgaaacgcatactcaacttctgtgatctgttcaattttattgccgatcacagcgcggaattcctcttccagatcctttctgataataaaaacaactttgttaaagcctgcctccagagcgtcataaatagaatactccataataatctcgccatttgggccaaccggcgcaagctgtttgattccttttccaaagcggcttccgattccggcagccatgatcaccagtgctgtttttttcattttattctcctccattatatattatctatgctgatatctgtatattttacattttacagacttcagtactgtaatatttttatttcttacgcttcctcattgttgagatttgccagtttagccgcctgatcagccgcaatcagactgtcaatgatctcactgaggtcgccgcccagaatgctgtccagacgatgcagggtaagcttgatcctgtggtctgtcacacgcccctgagggaagttataagtacggatcttctcggaacggtctcctgttccgatctggcttcttcttgcctcggcttctgcatcgtgctgttttgcaatctccatttcatacaaacgggaacgcagtaccttcagagccttgtctttgtttttcagctgtgatttttcatcctgacaggagatcacgattcctgttggaatatgggtcagacgtaccgcagagtctgtggtattgacacactgaccgccgtttcccgacgcacggaatacatcaaatttacagtcgttcatatccaggtggaaatcaatctcctccgcctcaggcatgatagccaccgtacaggtagaggtatggattcttccgcctgactctgtttccggcactcgctgtacccggtgaacgccgctttcatatttcagtctggaataagcgccgtttccctggatcataaaagtgacctctttaaagccgccgattccgttctcattgagactcatcatctctgttttccatctgaggctttccgcatatttcacatacatacggtaaatttccgctgcaaaaagagcagcctcatcgccgcctgcgcctgcgcggatctccacaataacgtttttgctgtcatttgggtctttgggaagaagaaggattttgatctcatgctccagctcctccacgcgtttttttgcgtcggaaagctcttccttgagcatctctctcatttcttcatctttctctccttccaacatggaaaggctgtcctgaatagtttctttattctctttgtattctttataagcgtccacgatcggctgcagatcgctctgttccttcataagcttctggaaccgctcctgattatctgtaactcccggttctcccagctcattgagaacctcatcaaaccggatcagaagatcctccaatttatcaaacattctgttcctcctgttactttattcttaggcaaaaatttttgttctgggattctgtcccagaaccaccctgtcaagtcccgcaagatcttttttgaccgttacctgttcaaaacctgcattttccataattccggtcactgcctggccctgatcccagccgatttcatagacaagccagccgccgggcttcaggtacttcctgcactcctctgtaatccttctgtaaaaatacagtccgtcctcttttccgtccaaagccatatatgggtcatgagtccgtacttcatccatcagagtctctatctcccctgttggaatatacggaggatttgacacaagcatatcatactctctctgtgtttttccactggtttcagaaaaatattccccggaaaacagatcactgtgtaccagaacggctctgtgatccagtcccagcttccgaacatttttttctgcaacctgaagagctccctcccaaaggtctgcccccgtgccttctgcctccggaatttccttcagaatactcagaaggatacacccggaacctgtacacatatcaaggatacgcggcttctctgtttttttcagaaggttcagcgcctcttccacaagaatctctgtatcctgccttggcacaagcactctctcatccacaaaaaaatcatatcccataaagcaggctgttccggtcagatgctgaagaggaatgtgttcagcccttttacggcaaagcttaagatatgctttttcctgcccctcttctgtctcctgatccatatgcgcataataatatgccctgttttttccagtaatatattccagaaggagccaggcatccagcctggcttcacctatttctgctgtctccaggatctcagttccttcccgcagcagcatttcaagagttttcatttgtttcttctcccggcttccagccgaattcctctttcagatacgctttccagtcaaaaactgcttctaccgcagcaatagccacctcaaccatatcctccgtaggttctattgttgtaagcttctgcatggcaagtcccggtttgcttaaaagacacgcaagcttattgtcagttctacctgcccactggatcatctcaaaagaaattcctgctacaaccggcaccatcagaagtcttcccagcagtctcacccagtaaaacggaaccagcacaaaaataaaatgcaggaaaatgctgaccagcatgaccagaaataaaaaactggttccgcagcgcttgtgctgccgggagcttttcataacattttctacggtaaggggcagtccgtgctcaatacagttgatacatttgtgttctgcgccatgatacataaaggttctctggatatctttcattctggatatcagaagcatataccccataaacaatgccagcttcacaaaggcttccgccactgttatcacaacctcagatgcgcctacattctttaaaagactggcaagagcatagggaagcagcataaaggcggctaccgatatcacaatggaaaacgctactgtcgcgtaaagcagccatttaaactgtctgtcctcttttctttttttggcagcgcgctcttcctctgaaagagccgcatttttttcagcctctttctcatcctcttcatcgcctgcaatctccgcagagtacatgagacatctggttcccactaccagactgtccacaaagctgaccacaccccggatcagaggcttccgccagattccggcattgccaaacgtacatttataatcttctacctttaactcaatttctccgtcaggacggcggacagcaatggaatacttatccttatgccgcatcatgattccttccataactgcctggccgccgatatttgatgacttcatattttcatattctccatctgtcataagctcttttgtctgaaagcaaagacaggttgagatttcccaacctcaacctgttctcacgttttcatattgtttaattatttgtttaagccgtattttctgttgaacttatcaatacgtccgcgagcctgtgcagccttctgctgtcctgtgtagaacggatggcatttagagcagatttccacatggatatcttcttttgtagaacctgttacaaatgtgtttccacagttgcaggttacagttgcctgatgataattcggatggattccttcgcgcatgattttcacctctctgtatttctttctattattttctattcgtgtatgagtagacgaatttattattttacagcctcctgagtataacatactcctttcataaatgcaagatatttataaaaatttctgtttttttgcagtctgtacaaattccgcatttgttctggttctggaaaacatattcagaatctgctccacggcctcatctgccttcagactgttcagagccttgcgcatggaggatacggtctcctgctcttcatggctgagaagaagatcctcgcggcgggttccggatttctgaatatcaatggcaggaaatacacgtttttcctgaagcctgcggtcaagcaccagctccatatttcctgttcccttaaattcctcatagatcacatcgtccatcttgcttcctgtatctacaagcgctgtggcaaggatcgtaaggcttccgccctctctcatattgcgggctgcgccaaaaaatcttttcggcatatgaagagccgcaggatcaagacctcctgaaagggttcttccgcttggctgcacacagagattatatgctctggcaagccttgtaatagaatccagaagaatggtcacatcctttctgtgttccaccagacggcgggctctctccacaaccatttccgatactcttttgtgatgctccggaagctcatcaaaagtggaatagatcacctcaacgtttggcccctggatcgcttccttaatatctgtcacttcctccgggcgttcatcgatcagaagaatgatcagatgcatgtccggactgtttcttaaaatagacttggcaacatccttaagaagggtagtcttacctgcctttggcggagaaacgatcatccccctctgtccctttccgataggactgatcagatccacgatcctcattgccatacttccccccgggcgctccatctgaagcctttcatttggaaatacgggagtcatatcctcaaaattataccgtttctgcccttcgctgggatgaaatccgttaatagaagttacatataaaagagcgctgaatttttccccctgagttttaatgcggatatttccctgaacgatatctccggttttcagattaaatctgcggatctgggccggagaaacataagtatcattctctcccggaagaaagttttcacagcggataaacccatatccgtcctgaaggacctcgagaattccattggctttctggccgctgtccagctgcgctgtttctgccggaatctttgcatcatcctgctgtatatagcttcctctgttttcattctgactgctgaaggctctcggattttcctcctgactgtatccgcttcttctgtcttcgttctgattattatatgttctcggattctcctcctggctgtatccgcttcttctgccttcattctgattattatatgttctcggattctcctcctggctgtatccgcttcttctgtcttcgttctgactattataaattctggaattttcatcctgagtatttccgtatctgcggccttcattttggcttccatacgttctgaaattctctccctgagtatttccgtatctgcggccttcattctgactgccgtgatttttcgaaaactcgctctgactgttgccgtatctgcggccttcactggcgctgttataggttctcgttccgccctcctgccagttattttttcttctgttgtcataaaatgcccgggattcctgaacatgtccattctgtctgtactgacgcaccggagtctgatgttcctcctgcctgtctttcttttcttcccggatttcttctttctgtacagtttccgaaattgctcctgtatctttccgctccttttcatcctcctgaagcatacgttcaatcagtgctggcttccttaacgtggaaattcctttcaggcctcttgcctttgccagctccttcaatgtcgcaagtgacaaggattcgtatttttctctcataaaaaattccctcagccttttctaaaaataatacccggttaattccggaactctatattatgatataaatattttacgggatactctgtcggaaccgacacgaacatcagaattccggaaaacagatagtcctgttttccggataaaccgtctttttcccgggatcactgtccctgatactgtagattttcaaattttattctagcatattttatttcttctgtctaccggatgaaacctcttactttattctgttcactaaagcccggtcaaaatgcctgccagagttcccggcaaaacatcagcctgcggacaatgccccatatacgccatcttccgtagcagaacagcttcatttccgattatctgtaaaaataaaatttttcattttactttttggtgaaagatcagtgaacgatatttcctacaagtccataggatacaacatacatgatcacagttgccataataattcctcccagaatagccagagaagattttttgatatcaacttccagaagagaagcgatcagcgctcctgtccatgcccctgttcccggaagaggaattcccacaaacagcatcagcccccagaactcatactttttgatctggtcgctttttcccatagccctgttttcaagcttttcaatcagaccatgaaaaatctttgtttttttcataagtttaaaaatctgtctgataaacagaagaataaacggaatcggtataatatttcctattatacatatgggaatggctgtcgctgccggaatcttcaaaagcgaagctgccagaagtccacctctcagttccagaatcggaaccattgaaataataaaaataaccatctctgccgaaataaactgggacagattatctgtaaaccactgtactaatacttccatattacctcctgctaattaaattttttgctcattcagataatttctgagaaattctgtaagaacttccatttccttttgcgttcctattgtaatacgcagatgattacctgttctttttcccggaaaataccggacataaatatgatgctctcgaagcgcctggaataatttctccgccggacagctctcatgagaagcaaaaataaaatttgccatggaatcctcaaaagaaaatcccagctttttcagttctttttttgtccattctcttgtctcaataattttacggcaggttccgtcaaaatattctctgtcttttactgccgccacccctgctgccagagctgttgtgtccatcgtataagaattaaaagaatattttacatcattaaggtaagaaatcagcttcgaatcgccaatggcaaaaccgatccgcattcctgccatagatcttgactttgaaaaagtctgcacaaccaggagattatcatacttatctacaagagaaacggctgactgtgcgccaaaatccacatatgcctcatctacgatcacaacgacctctctgttatgcgccacaatctcttccacatccgcaagagacagggctacccctgtaggagcattgggattgggaaaaataattcctccgttttctctgaaataatcttcttttttgatatggaaatgctcatccagaaccggacgttcataaggaatccgaaaaagctccgcccagacatcataaaaagaatatgtaatatccggaaacaaaatcggctttttaccgttaaaaaatgtaagaaaactcatagcaagcacatcgtcagaacccactcccacaaacacctgctgtttttttactccgcaggcttctgcaatggctttcaccagatcatctgctgccggatccggatacagtcttaatgactccggttcaatcccactgagagctttgcacactcccggcgccggcggataaggattttcatttgtgttcagtttaatcatgtcctgatgatcaggctgctctcccggtgtatagggaaccaccctgcggacatttgcttcccaggtctgcatatttttcgccactccttttctttattccgcattacatatctgctattgtaccgattcttttcccatttgtcaaagctttcatgaggggagctctgctgtaaaaatataaaaaaccgccttccattccggtaagcccaaaatggaaggcggcactgcttctgtacaatatatcagattcttgccacgcctgtttttcttgcagcatcggcaactgcctttgcaaccgcaggtcctactctcttatcaaaagccttggggataatataatccggtgaaagctcctcatcggagatcagcgctgccagcgcctcagaagctgcaatcttcatctcatcattgatatcttttgctcttacgtcaaaagcgccgcggaatacgcccgggaacgccagaacattattgatctggttagggaagtcacttcttcctgtggaaacaacctttgcaccgcctgcttttgcttcatccgggaagatctccggtgtcgggttggcgcaggcaaaaataatcgcatcctctgccattgtttttaccatttctgttgtcacagcgcccggcgcggaaacaccgataaacacatctgcgcctgcaagcatatcagcaagagaacctgattttttatccaggtttgttaccttgctcatttcttccttaaccgcattcattccctctgcacggccttcgtaaatggcaccctttctgtcgcagagagtaatattcttaaatcctgccttcagaagcagtcttgcaatggaaatggctgctgctcctgctccgttcatgactatgcgaacatcctcttttttcttgcccacaaccttaagggcattggtaaggcctgccagagtaatgatggcagttccgtgctggtcatcatggaaaatcggaatatcacatttttctttgagctttttctcaatttcaaagcatcttggagcggaaatatcctccagatttacaccaccgaaagaaccggagatgagataaatggtattgacgatctcatctacatcatggcttttaatacacagaggaaacgcatccacatcgccaaacgctttaaaaagaacgcattttccttccataaccggcattcccgcctccggtcctatatcacccaggccaagaactgcggaaccatcggtaacaacaagacacatgttccatcttcttgtaagatcgtatgatttgtccacatccttctggatctccagacaaggctgcgctacacccggagtataagccagggaaagatcatcctttgtctctaccggaacagttgtcacaacctcaattttgcctttccattctccgtgtaatctcagtgattcttttgcgtaatccatttttatatcctccttagggattcttttaatagtttcctgtaaaaaacctgctgtcctttggaagctcatagtccttaaaatacttgccgaaatcaagctttaagtatccacacaggtttgcaagctctaccatagtgttgtcattgaccggaataccgttttctcttctttctttttctgcaaagacttctttttcaccatgggtatagatgcgatccttgccttcagccctgggactttctctcagggcctcaaggtaatcggaaaaatgttttctgatggctgccggatcaccgaatgctgccggatcaatagccataaagccatggcagattccggttttgtccgggaaagtacagcagctgtcagaagtcacgcccatggaaagaatggagctgaacagctcgcagagcattccgtagccatatcccttatgacttcctgtcacctcttcgcttccgccaaggggcattattccaccacccttttttgccacaatatttgcaagtacatcaggagcgtccgtgcttgcatggccgtccttatcaagagcccagccatccggcagcggtttttccatcttattgtacatctccagttttcctctggtaactactgtagttgaacagtcaaagaaaaacggatagggatcagccggcattgccactgcaataggattcgatcccagcatggcctttttgccgaatgtaggaaccataattgcctcagagttggtgcatgccataccgatcagcccctgatcgcatgccatttttgcataaaatccggcaatgccaaaatgattggactcacggacactgacaatgcccacacctgtttttttcgctttttcaattgcctttttcatggcaaaaacactgatcagctgtcccattccgttatgtccgtcaataacagcagaaatcggtgtttcaaatactacctctggtttggcgtccggatggatcgttcccttttcaatacccttgtgatagcgaaccattctctgcattccatggctctcaataccataaagatctgctgtcagaagcacatccttaatttctgcgctctcttcatcattaaaaccaaaagccttaaatacatcggtacaaaactgatttaatgtgtcatatgaccattttacatatcccatgatagttccctccgttttctggtagtgccaaacgttttattggttataccaatttgtagtttcattatagcatcggtcataccagagcacaagaaaaatcttttgatttttatgcaaaatcatattattttaatgggatcattatgtaaaatagtatcatatagacaaaatatcagttgtcattcttcttcccgaagcatttccgacataaatttctccacagtgaccatatgctccgacatacacctctctgccgcttccacatctccgttaataattgcttccaccagcctgtgatgctgctcatccacaacagcggcagactgatttttatgcatgatataatctctgattccggaaatgatactctctgtcagcttgtccgcagcagccagaacactgtagatcatgggattgtctgcaattttggcaatcttctgatgaagttctttatcaagctcacccctcatcttctcatcttcagcagcatccagcctggcaatgatcatccacagctctgccgcatccagaggcgtacacttttttgcagcaagaattgcattttccctttcaagtgctgcacgaagctgctggttctggcggacataaccattattcagctggaaaaggatggacagaggtccgatcagccaggtatcaagatcttctgttatataattgcctcctccaggcactgccttcagaattcccagaagctccagtgctcttaacacctctcttacagcagctcttgaaacccccatggtctccgccatagtacgctctgccggcagagcatctccagccttcagcttccctgtctggatattgtcaataatctgcttcaatattccatcaaacgcccgttcttccccaattttcctaaacatacttctccttaattctttttcatttaatatgcacctttacagctctttatcagaaacttttgtacgtcataagtatatcattctgcctgataaaaaggcaagcatttaaaggcggctcagatagttttccttccaaatcagcatccgtttttttatttatgtgcttcccatttacattctgtaatttccatttctgtaaaggtggctttaaaagaagaattttccgggctgcacgcataaatgccaaaggtgatctcccctgcaccctcccacatatggcagatacgcatctgtttaaaattcactccgtctgtgctgcactcaatgcagaaatcactttctctcctgcttaggcgataccacatttcttttacagatgccggaatatccatagtagcccaatcagaatagccatgattagttgctacacttcccagacgctgatactcctcattctcatattcaacagaagccttcagccagttttcgctgtccagatacacagccactccgcactggtcaaaacggtgcttactctcaaaccttgtccgcacagtaaaagaaaaatatgtgtctgcggtttttgtctgaagtacaggcgcattatcattctgaaatccataataagtacgctgccacaaatctgtgccgcactcagtaatgatctccacctttgtttcatccataaataccctctcaggtttccttgtccatatcagttcctgttttaaaaattctgccatttttatcctcctcttttattttttgtctcctgtaatcattctgggagtcaccgtgatgtctctctgtacttctttttcttccagaatatccatggcagtatcataagcaagagatccaaaatccgggctctggatagttgcatccagaatttctttttccaccagattcagtccggcgctttctccctcaaatccgtctacccccacaaactttgttccatttcccatacgaagctgttctccggcaatatacgctccatacgccatctcatcattaaaggcgaaaacaatatcaggagcgccatttacaacaaggtaatccttcatccgggcttctgccacatcccggaaccagtccccataataatacacaatatctttttctttgacttttttcttcactgcttctgtaaaaccgcgaagtctgtcctctgatataggcgagccttccacgccctgaaacacgataatcttatcaccctctgtataaaaattctccagaatatattctcccgccatcttgccaattccgttatcatctgcctgtatcaccgttgtataagcctttgtctgcggctccactcctacaaccacaataggaatttcctcaaaaacctcctccataatcccgttcagcgcattgctcccgtccggagaaacgattaaaagatcaattccgcatttcataagagcttcgatatcctgtatctgcttttccgtacttcctgccgcatccctgaaaatcagattcacatttttttctgtctctgccctgcttccgatcacctgagccaggttgttcagccagggttccattacattggtaagacttactcctatcagatattcatagtcgtctgtccgtacgctctctgttccgcatcccccggtacataaacagacaaacaaaagaagcgccaatatccattttttcacaacctcactcctcccgggtcagagttctccgaaattctgaaggagaaaatccctgacagtttttgaatgctgcagaaaaataatgctgattgctgtatcccacctgttctgcaatctgattcagagaaagacggtcattgcgcatcagagaaattgcctggctgatacggagcattgtcagaaaatctttaaatgagattcccagctcctgcttcatgatccggctgagataagagggattgcagccaatagcgtctgccacctgggtaagatccagttctctctgctgataatgagcataaatatattttctggcttccattacaattggcctgcactccagaatctttctggcacgggttcgcagcttttcatgaacatccggaatctcatcccttttacaggtctgtatcaggacacagcattttccatctactgtcttatttattttttctgatatgatttcctgaaggttctctgtttcacctttataacctccgatcattcccacagcatcctgataccggttcatgaacacatatacaggcttgtactcgccgatcaaattcctcataattttttccagagtcattttgtaaagctcctcaggaacagctcccgccggaattttttcagtaaatccgctctgcacagaaacaagaatcagcatcactgtatccggaagttcaatttccagaaattctctctgttcctgccattcttttccggataaatttccattgatccagtcattaaaaaacacgtctcttatggtatttttattctgtacaaactgctgccgcatcagattcataaattttctggatttccgggtctgccacagttgccggctcacactttccagagcttctttcagctcactgtctgcaattggtttcaaaagataatgagacacccccagggtaatagcctgctgtgcatacgcaaactcattaaaaccggaaataataattactttacattctatagaaagctttttcagctcttccagaaatttaatcccactgagctttggcatgcaaatatctacaagaagaatatccggctcatattcctttgctttttccagcgcctccaatccgttttttgcctctgcgcacacacataggggcaagtcaaaggtttccagtgtatttttcagtccctgacgaatcttcggttcatcatctgcaatcagtacgttccacatatgtcctcctatttgctcctttttatccttaattctgcaattacgccgccgccctctctcagataataatgcagtccatattcctctccatagaacatccgcactctgtcgtttacattcagacttccaaatgcatcaacctctgccatccgttctttctgagcaaaccactgattcagctgtcgacagcgctcctctgtcattcctgcaccattatcctccactttcagaacaacagaatcctccccttccggatatacccgaatccaaatggttccatgctctctctcggattccttgatcccatgataaagtgcgttctcaatcaacggctggagagaaagccgcggaacctgacacttaagaattgcaggatctgtccagacctcatagtcaaaaagctcctcataccggaatttctgaatatccagatagctttttaccatggcaatctcctgctccagactgataaactcttttccctggcttaaactgatcctgaaaaaattagataatgccagtacaatgtccactatatcctgtgcatgatatccctttgccatccactgaatagtgtccagggtattataaagaaaatgcggctttatctgctcatgcagaatctgcagttctgcttctcgtttatgtttctgctcctgatagaccagtttcaaaagctcatctgtttttgccaccatagaattaaacgcatctccaagctgatggatctcccctttatagtggttgtcaaaacgtactgtcagatctcccgtctgcgcccgcttcatcagtctggacaatttagatatgggctttgtaattgaggcagcaaatacaacagagcacacaatggcaaaaacagctataactactgcgatcagaattgatgccatccttacctgcgaggcaccctgaatggtttttccccagtcaaacactcccactgcagttaaatcaatataagaagagcggctgtagattacattatacatttccccttcaatattgcagcgcacctgtccgctgtccccttgagaaagccattccggattcatcctgtacaccaccttgtttttcggagcatagagaaccttgccctgactgtcctgaatatagctgaagccagtctgtcccatggtaatatcctcaacaagattctggatactccggatatccaaatcgaccagaatcactcccagaggctttccgctttctgtatccggaaccatctgcaccgctgttacatagctgtctgtactgtaatttttccagcttttcagatttcttcccagagagtttccagtcagtaccagctccccgtctgctttcagcgcttcctgataccagtcttctctggtaagaggagttttctgaatgcgataggaatcatttgaaagataatgccctttttcgctggctgtcacaatattaagataatcctcataatgctctgaatagcgcagaagcatatcacggactttactttccaaaatcacacgccgcgcctgctccttctgttcatccactttcagatattcctgaaattccggcgcagcgcccagggctgccacattatcagaaacagactgaaaaatcagatccagagccttcaatacctgattctggatttccattgtgtttgcataagaactttcctctatggaattctgatagattacatttcctgttccggtaatcactacggttacaagaaggaggagaccgcagttcagggcagccatcctgaacatcatattttccggtttaaaaatttttttaattttttccaacattcctttcctcctgacatgctctctatcataccagaaaaagggctgcctgcgcagtccctttcctgtaaaagcttattattatcgtattattcttctgtcttctcttctgcttcttctgtctcttctgtttcttctgccgcaccgtcatcggatccgctgtattttgcaagaagctcttcagcattgtcaggcgtaacgatttcagattgcagagtcagttctttttccagttctttaccttctaccagaagctgatatgcgctctcaatcgcctcagcaccgccggtgggataaacctgagtcatgcttaatctgccgtccataacacttctgataccgccgtcaggtgtgggaagtccgtcaaaaccaacaaagaggatatctccttctctgcctgcattctttgctgcaatgtaagcgccttctgccatcgggtcattcagagccaggaaaagatcaatctcatcgtttgtctggagcatttcttctgctacggtgattgctttttcacgaagccagtctgcattgtttgctgcaacaatttcaatattttcgttctttttgatcccctcacggaaaccattgtctctgtcaataccgccggaggttccctcaaggcctttgatctcacaaacttttccgccgtccggaagaagaacatctgcaacatactctcctgctacacgtcccatatctacgttatcagcgccgataaactgtgtatatttgtctccgtcaatctttctgtcaagaaggatgaccggaatccctgcatcataagcagaacttaccgcatttgtaagaggagtagcctcatttggagaggcaatgatcagatcaacacccatctgtacaaagttttcaatgtcagcaatctgcttggagttatcctgtgcagcgtccgcaaaaaccacttcaaactccggatatttttccgctgccattgcgatctgatcgttcattgcaacacgccatggctcgccaaggttacattgagacataccgatcacatatttgtcttttttctcttcttctgcatgaacagtaactgcccctgctgcaagactggatgcgatcattgctgctgccagtaacacactaatggttctctttttcatataaccctactttctccgacagtgtatttatttttattgttcattcctgccttccgctgccgaccggaagagaagaatttgtttcacatatgtaattgtctgtcagtcttttaccttatctgcctgcataaatacggcaatgataataaggaaaccttttactaccagctggagattggaatttacacctttcagaccaagtacgttgtcaagcataccgaggatcagcgcacctaccagtgttccgaccagtgtcccctttccgcctgcaagactggttccgccaatggcacaggctgcaactgcattcagctcatatccctgaccttcgtttggtccgccctggctgatctgtgccgcatggatcatagctgctacagatgcaagcattgcacagagcataaatgcgtatgttttgattctgtctactttaataccggaaagatatgccgcctgacggtttcctccaatagcataaatctgacggccaaaggttgtttttgtaagaacaatgtgaaaaatgatcaacaatatgagaaaaataatggcaggtactggaaccacacctccgattctcatctgtagaacctcaaatgccggcggagccattccctcgccttctccgtatgccagtgggataccgattccatttgcccagaatcttgcaagaccgcgggcaatgttcatggaagcaagtgttacgataaatgcctgcagtttcagtttggtaatacagagaccgttgaaaagtccgaacagaccgccgattacaagactcaaaagaactgccggtacgaatccaagtccgctctttaccatcagatacgcacagccagtggagatcaatcccactacagagccaaccgaaaggtcaatatctcccagaatcagaatcatggtcataccgattgcaataataccattctcagataccgctctcagaacattcatcagattgcgcagatctaaaaaattgtttttaccgtctttcacacagacaaccgacgctactacaaatataattaccagagcgatgacactttgcatctgtttgagcatcgctttcatttttactttgttttccattgttcaccctccctatcttgtagcactctgaagaagtttttcctgagttgcatcttcctgcataaattcgccggtcagctcgccctcacagaaagtaacgatcctgtcagaaatgccaataacctccggcagctctgaagacactacaataatcgccataccctgttttgccaggttgttgatcagttggtatatctcggcttttgcacctacatcaatacctctggtcggctcatccagaagaaggattttgggatgtgtcatcaaccatcgtgccagaaccactttttgctgattgcctcctgaaagagaacttgccagtgttttataaccgggagcttttactctcaaagcctccatctgttcctgccagacctttttttcttcctgatgcttcataaaaaacatggagctgaatttttttaataatggaagggacatattctccccaatggatctctgaagcaccagtccggagccctttctgtcttctgttgcaaaagaaatacctgcacggatggcatctgcgggagttttaatagtcaccgaccgtccctcaatgatgatttctcctctggtatctccatggtgcacacctgccagacattcaaaaaactccgaacgtcctgcgcctgcaagtcctgcaattcccagaacttcaccgtggcgcaccttaagagaaatattctttaaagaacgccgaaagcttcccattggcggcgtgtatgtaagattttttacctccagagcaacttcacctttttccgtaggatcttttgggtactgctcactcatatcacggcctaccatcattctgataatctcatccttggatgtttccgctgccttgactgtgccgatatactggccatctcgcataaccgtaagcctgtccgcaatcttaaatatctcttccattcgatgtgtaatataaataattcctttgccttcaccgcgaagcctgcggataatggtaaacagcttttccgcttctttttcactgatggcggatgtaggctcatccatgacaataatcttggaattaagagaaattgcctttgcgatctccacaagctgctgctctccgatacggagatctttcagcttttttgaaggatccacatgcacatccagcatgtccagatatactttagcctcatccttcattgccttgaagtctactgcaggtccggcggaggttttccatcgtcccagaaaaatattttctgccacactgagctccggcacaatctgaagctcctgatgaattttggcaattcccagtttcttcgctgtgatcggatcaggtacgacgactttctcaccatttaagtaaatctctccttctgttggctgcagggaaccgcttaaaatattcataagcgtagattttcctgcaccgttctcgcccatcagagccagaacctcgcctgcatagaggtccagggaaacacccttcagagcctgaacgtttccaaaggttttactaatatttttcatatcaagtaatttcttttccatagctcctccttatccgttctcatatgatatgtgtattatacacaaaaaaccacggcatgtatttctaattttcggtgttctttttataatttctttactttaatttcattttatcattattttttgttcatttttaacaatctctgtttttcttccggcattgacttttacccagtacctccgtatactttttttatactgaaaacaggaggttttttaccatgaaatacgacttcacttccattacagacagacacggaaaagattccattgcagtagatgcacttacaggctcaggctttgctcctgctcctcccaaggacggctttgacatcattcccatgtgggttgcggacatgaattttcccactgtacccactgtgccggaagctatcataaagcggacacagcatcctttttacggatatttctcaccctcagaggaatattttgacaaaatcatccgctggcacgaaacacgcaaccatgttacaggtcttacaaaagaatgtatcggctacgaaaacagtgttctcggcggtgtgatctccgcccttacctcttttgcgtcgccaggagataaagtccttctccacagccccacttatatcggctttaccaacagcctcagaaacaatggctttgacatagttctcagtcctttgatccaggatgaaaatggtgtctggcgcatggactatgaagatatggataaaaaactccgcgaaaacaatatacacgcagtaatcttatgcagcccccacaatccctgcggccgtgtgtgggaacggcaggagctggaaaaagccatggaaatttaccgggcaaatgactgcattgtaatctctgatgaaatctggtcggatatccttctggatggtcataagcatatccccacccagtctgtgaatgaggatgccagaaaccgcactgttgccctgtatgctcccagcaagacctttaatctggcaggtctggtgggaagctatcatatcatctacaataaatatctccgggacagggttcaggcaaaaggcagcaaatcccattataatgaaatgaaccttctttccatgcatgctctcctgggcgcctaccagccggaaggctatgaatgggtagacgagctttgccaggttctctcaggaaatgtcagctttgcctgcgattttatccgggaacattttccggaaataaaagttgtaaagccggaggaaacctatatgctgtttctggactgcagccagtggtgccattcccatgagaaaactcttgaccagcttctgaaagccggatgggatgtaggtgttgcctggcaggatggccgtcccttccatggcccctgccatatccgtatgaaccttgccctgcctctttcccgggtgcaggaagcatttgaacgtctggacagatatgtattctgataaaaggagagccgtgtgaaaaaaattaacaatctccggtttctgccccggatttctgaggcagaaaaaagaaggcgcaatcccacttaccggaatgcccgtaaagcatatacaaaaaacctgctttttttctttcctgtgtggattatccttctgattatatttgtttctgtgatcacaaatatagaaaaccgcattctggcaggtattgtcggcctttttcttgcggcttctcccattatgggccttgggatcgcctgtaacctcagccttcgcctgtgggtctgtccccactgtggaaaggaacttcctgtgcagcatattcagtatgtttctcttcctgtgtacaccgctcagtgtcccggctgcggatattctctggaagaaacaatcccctccagtgcgtcatttacacagacttcctgtgagcaaaatcagaggattgataaaaaaagaaagcttccggccatggttttcggtgttcttctgcttatgtgcgctgcatttatgctgatcacatgctttgtttctatcggaaaagatcccggatatgcaattgcagtcgcttttttcattactgcctttactctggcttccggaatttttcttttcatgcctcatactccggagaggcacacggaagaagaacccttcttatatgtacgaacctctgtactaagactggttgcaggcagtttcctgttacccctgggatggctgattctttttgttgccacagcgactgtcgccgcggagcctgttaatatatccatcttttttatgttcataacaggatttatattgtttctatggggaatatggtgtcttctggcttaccagaacaaaaagatcctgcttttccgcagcggtaaactgatatactccgcaccatacggaagatacaaagaatttcatacaaaaacatttgcctcaatgaagtatggtgccatgggttctgtccggattcatgattcagccggaaaccttcttttttctttccgtgcctctctgcccggcggagcacagcttacaggctggctgtcagaacactgtgaaacagcttctgctgccggaccggaccaaaatacaaaacagtcccggacagtcagagcttccagagagcctctggaatggaaagaagaataccatacgcctatgcatgatcacctgaaagcaataaaagcggggctgatcgtcgtttctcttcttgcgcttgcaggaaccatacttccgtttctttttatgacagaattcagtttaacctgcgctgcaataactatgactctgtctttgttccttccagtgatctactacctgattttttccagtgttctgtctctggacggtaagccccgtcatgccactgcagaatggaaatccatgtacatcaccatgccggtttttcctctgggaattctgttcctttttgtggttcaggttatccgcgtttttgataaagtaaggctgactgttgccgattccgaccgttcccttatctgttggattgtcattgcagccatacttatcgtcattaccgtaatacggacaccaaagcacctgcgtggagagggtctgtttatatgggaactttttctgtgtcttctgtcctattcactttcttacagcctgaatgccgccacctgctcagaggccgtgcataccactgctgtaatcactgacagttctgtagaaaaccgcgacaaagacgatcctgactattatctaactgtcaaactgtatgatgctacagaagcagagatttgcgtaacagaagatctttatatgatgtatcagacaggacagccaatttctctctgccagagaacaagcgcttttggagtacgcatggttcaacttcatacgccgctgaataaagaggctcgctccttttacaacccaaaataaaacctatacagattgtcataatctccccagaatatacacttcttaaatactgcagaaaaggaaccgggaatatcctccgatggtattcccggttcccccttatcagttgttttatactgtccataagattcttctttctacttttcgtattgctgtcttatgtacccagaaaatgccttcgtctgtattttcctggctctgcagtttctcctttgtatatgctcctgttaaaaacaggttttttctcaatattaatgtacactgagaaaaaacctgtctgtcatccttaaaagtatatacttttactccactgctgcttttttcacctgtgcaagcgctctggcaactgcaggaatggaaataatgatcaccgtgatcactccctctgccagcagaaagctgtagttataaacaatcggatacactgctttcagagactgggggaaattttccggcatatagctcatccagtaaagatatccgcccagtgcgtgaaaggctcctcgcgctatcactgctgcaatatagcctttcacaagtccatggctgctttttgcaaaaaagcctgccactcccagcgccgcaaaagcaagaacatagtcgcagcacacctggaaaaaggacagcacatagggttcctggataaactgcaggattccgtaagccagacctaccattacaccggttttggggccgtaccagttggcagtaagcacaataaagagcatactacacagtgtgacacttcctccccaaggcaggtgaaaaattttcaggtaagacgtaataaaggcaagcgccaccgccatggcgcagaatacaagctgtttagcagacattttcttcttttcagagctttttcctgcaaaaaagatcgcaagaccgaacagcgccactcccactgcaatgcacacagcatacccggctgttgtaagcccgccgtctgcatttaccataaattgaaacataaaaaaacctccttcatcttcgattgaagacaaaggagatttacatctcgcattcagcgcatacctacgttggcattacccaaatcaggttacgggtcgaagtttacaacttcctctcagcctgtgacacaagctcccctgtcgacaatccatatgtaataatttcagaaaccgccattgtcctttaacatccggtcaggcttctgtaacgaatcctattatatacctgccgcttataaaaagcaatgtattttccctgtctcagatttttttcagcttggcaaaacctgcaaacatcttttttgttcctgctctgtcaaagtctactgtaacctcgtaatctcttccaccctctacgatgtcctttacgattcccacaccgaattttacatggcgaaccgtatcgcccactccgtagtcaagactgtctgctttttttacctgaaagcttttgggctggaaggcctttgcctgaaaagccattttcatctgcatatagctgctttttgcagaagtagtttccggcatctttggcttgtgctcctgaatggtatgtcccagttccaccagctcccggggaatctctcttacaaatctggaaacacgattgtactgggtttcaccgcgtaccattcgctgctgggcgcttgtaagggtcagctccttcattgctcttgtgatccccacatagcaaagccttctttcctcctccatatccgacagatctgcagaaaaaatacacatactgcttgggaacattccgtcttccatccctgccagatatacgtaaggaaattcaaggcccttggcgctgtgcagagtcataagaagaacataatcctgatcaggatccacagagtcaatgtcagcaaccagggcaatttcctccagaaaaccggaaagggttgcctctcgtccttctgccgccatggcttcctgataggagactgtttttgagatcagttcgtcaatattttcaatccttgctctggactcttctgtatcctcttcctttaactcatccacatatccggtaagatcaataatctcctccagaagttcttccactgtatatgcagccgccttgcttttcaatgactgaataaaagtcacaaaaccgtcaatttttgactgggctcttccaagagacggaatttcctcagatacccgcagggcatcataaaagctgatctgcatatggtctgcatactgctgaacccgtcccacagtggttgctccgattccccgtttcggcacgttaagaatccttcgcacagccagatcatcggaagcattgtcaattgttttcatgtaagaaagaagatctttaatctcctttcgggcataaaagttcaccccgcctacgatcttatacggaatgtttgcaagaagacacttttcctcaaaaagtctggactgggcgtttgtccggtaaaggatcgcacagtcacggtagctgcatttgccctctctccgcctggaggcaatatctcccaccacatactcagcttcttcaaagccgttcataaactggcgaaaatggattttttctccctcgggattctctgtccacagagttttgggctttcgctccgtattatttgcaatcacttcatttgccgcattcaggatgttctgggttgaacggtaattttgttccaggcgaatgacttttgcctccggaaaaacctgttcaaatccaagaatgtttccgatatttgctccgcggaatttgtaaatagactgatcgtcgtcacctaccacacagagattttcatatctggatgcaagaatacttacaaatttaaactgggccgtattggtatcctgatactcatccaccataatgtaacggaaccgttcctgataagactccagaacctctccgcagttctgaaacagttctactgtttttacgatcagatcgtcaaaatcaaaggcattgtttcttcttaatgaaatctggtattcccgatagatctcagcaacctttttttcattaaaatcagctgcgttcatcagcatttcatccggtgtaacaagctcgtcttttgcatgagagatctgagcaagaagagagcgttctttatatttcttggtatccacgttcagccttctgcacacatcttttatgagagttttctgatcgtctgtatcataaatggtaaaattattatcatatccgatgcggtctgcatgtctgcgaagaattctcacacaagtagaatggaaggtagacacccagacacttcccccgtccagacctacgatcttatccacacgctctctcatttcctgagcagccttatttgtaaaggtaatagcaagaatattccaggggtttactcccttttctgcgatcagataggcgattctgtgagtcagtactctcgttttgcctgaacctgctcctgccaggatcagaagaggaccttcggtatggtaaacagcctcctgctgcatattgtttaatgattcatatatactcatattttctcctatattctgtcagttcatcattttttccctgcatgtctcgggatttcggcatatacatgccaagacccctgcaggatagtgacctgtaatcagtagcttttacttccagcgcattcctgcatacactctgatttcctgtatcatgcccttcattgtatcatagatctgcgcctttatgaataaaaatatttcatccgcatttaaaactgcatttgaaaaaagcccggcattacgccaggcttttttccagtttttcaatcatttcatcaatatcttcttttgtgatcacaagaggcggaaccagtctcagtacatcgcttcctgctgaaatcaccaaaagtccgttttccagagccttacttacaatcgtccccacggaaataccctgtatcacaagtccctgcataaatccttttccacgtctccgggagataatttcatatttatccacaagagcgtccagtttttcctccagatacggagtcagctcacggacatgctccagaatatgatctttctcaaaaatatcaaacaccttgctcactgctgcgcacacaaagggatttcctccataggtggttccatgatctccaggttccagagacgctgccgccgctttttctcccagaacaaaagcgcctaccggaacaccgcagcccagagccttggcgcaggtcataatatccggctttacaccgtaatcctgccatgcaaaatatgttcccgtacgtcccataccgcactgtatctcgtcaaaaatcaaaatcaggtctttttcatcgcaaagagctctcaacccctgcaaaaatcccggatctgccggataaattccgccttccccctgaaccacctctgtgagaatggcgcaggttttgtctgtgatctggacttttacactttccagatcattaaaatccgcaaatttcacgccgccgatcagtggctcaaagggttcccggtaatgagcggtcccggtaacagaaagagctcccatgctccttccgtggaaggaatggttcatggcaatgatctcatatctctccccgttatacttcgtgcaggagtatttccgggcagccttcagcgctccctctatggattctgtaccgctgtttgtaaaaaacgccctgctcatgccgctggcttttgcaagcttttctcctgcctcgctcataggctcattataataaaggtttgaaatatgaagcagtttgtcgatctgcgctttcagcgcctcgtcatagccgggataatgatatcccagagcatttaccgcaatccctgccgcaaaatcaagatattcttttccctctgtatcataaagccggcagccttctccacggtcaaacatgaccggaaatcggttataggtatgaagaatacttttttctgcctgctccatctgttcatgcatgctcatcataatatttttcgccgtcctctcttaaaatagctgttccgattcctttatttgtaaagatctccagaagaaggctgtgaggaatcctgccgtccagaatatgcacccggtttactccgtgttcaatggcgtcaatgcagtttttcagcttggggatcattcctccgcctacatagccgtctgagatcagcttttccgcctcgtgaatatgtagctcggatatcagactttccggatcattctgatccttgtaaactccttcaatatcagaaagaaaagcaagcttttccgcatggacagcctcggcaatggcgcaggcagcgtcatctgcattaatattataggaatcataattctcatcatatcctaccggaaaaataatgggcaaaaaatcctgttccagaagctcatgaaggattctcggattgacctcctgaatctctcctacatatccgatgtcctctccgtttgacagcttctttgtgcatttcagaagtccgccgtccttgccgctgattccaactgcgtccactcccagagattctacaagcgtaaccagctctttgtttacttttgcaagaaccatttctgcaatttccatggtgtctttatctgtgacacgaaggccgttgacaaatctgggctccattcccactttatttacccagcggctgatttcctttccgccgccatgaacaatgatcggtttaaagcctaccagcttcagaagaactgcatccttaattacatttgctttcagctcctgatcaagcatagcgcttccgccgtatttgatcaccacgattttccggttaaatctctgaatataaggaagcgcctcgatcagcacctctgccttgtccagatatttctgttttaccatttttttcctcctcgatttcctttttctctcttcttccttacagtccgtttctcagccactatgatacagccaaccataaccagccactgctctgacagatcttaatatccgtcagagcctttattcgttgtaccttttatcttccgaatcaggaacggtaatccgcattgatcttcacataatcataagtaagatcacagccccaggcggttgctgtacagtctcccattttaatgtctgcaatcgctgttaccgcatcctcagaaagaattttagttgcctcatcctcactgtagcctgtggaaacaccgttctcaataatcttaatctttccggctctgctctcaaaatacagatcaaccttttccggatcaaactgggcgccggaatatcccatagcgcagaggatacggccccagttggcatcatggccgtaaatcgccgcctttgtaagtgaggaagtcaccactgatttacttaaagtcactgcctgctctttactttctgccccgatgatcttcacttcaaaaagagcggtggcaccttcgccgtctcctgcgatctttttggcaagctgagtatttacataattaagtgcttggcagaaagcccgataatcttcatttttttctgtgatctccggattccctgccataccgtttgccagaaggagaaccgtgtcgttggttgaagtatcgccgtctacagaaaccatattgtaggtatcttttacgtcctggcttaaagcctcctgcagaagctccttggaaatattcacatctgttgtgacaaatccaagcatggtacacatattgggatggatcattccggagcccttgcacattccgcctactgtcactgtttttccgccgatctcaaactgaactgccgcctctttttctacggtatctgttgtcataatggctttcgctgcctgatttcctgcttccaggcttccgtcaagctccggcgccatagcctctacaccggctgcaagcttctgaaccggaagctgcattccgatcacaccagtggaagccacaagcacgctgtccgggtctaccttgagggtttttgctgctgccagggctgtctctttgcagcattcaaagccttctttgcctgtacatgcattggcaatcccactgttgcagatgatcacctgagcctccggctgattgtacacaatatcctggtcccattttaccggagccgccttaacaatattggtggtaaaggttcctgctgccttacagggaacctcactgtataccattgccatatccgttcttccctgatatttgatcccggcagctgtagaggctgcctgaaatccctttgccgctgtcacgccgcctgtaatgatattcataataatcttctcctccttttttcctgctccggaatccactctgtttttccggtttcagagtttctccgctttctgtcacacactgtacctgcagtacttcatcgttatattttgtgttacggcaccatgggaatctggcgaagtccctctgcctcatcaaagccgaacatcaggttcatattctgaaccgcctgacctgctgcgccttttacaagattatccattgctcccatcataataatacgtccggtgcggggatcgatcttaaagtttacatccacaaaattgctcccttccacccactttgtctgagggcatacgtctttatcaaggacacggacaaactgttctttttcataatatttatcataggctgcctttacttcctcataggaaacttttttcttcagagaagcataggcagtgatcagaattcccctgttcattgggatcagatgaggggtaaaattcaaaaccacctcttcgccgcaggcatagccaagctgatcttcgatctccggagtatgtctgtgtgaagcaacgccatatgccttgatgttttcatttacttcacagaaaagattatccaccttcgctcctcttccggcccctgaggttccggattttgcgtcaattataatggtagacggatcaatcattccctctttaagaaggggataaatggaaagcgtggagcaggttggataacatcccggattggcgatcagccgcgctcctttgatcttttcccggttgatctcacagagtccgtacacggcctcttcgataaactgaggtgccttatgctctatcccgtaccacttttcatatttttttacatctttaatacgaaagtccgcactgaggtcgatcacctttgccctggaaagaatcccttcatttacaagagaagcgcaaagcccctgaggtgttgcggtaaaaatcacatccacttcatctgccagagcttccatgttatcatccatacattttgcatccaccagcttaaaaaagttctgatagattcctgcgtattccttatcaatatagcttctggatccataccagaccacttctgtttctttatgtcccagcaaaagtcttgccagctcgtttcccgcatagccggtggctccgataattcctgcttttatcataataaattctcctcctttgtccatacggcatcttctttttatgtatgtgtatgccgtttctgtcaggatgataagattatacatccattatgcataatatgcaataattatttttcacaatacattttattttttcagtctccctttatacaaattgattattacctataaatatactgtagtttccaaaaaatctttttaaagttttttcattttgggtattgcatatttataaaatttgttgtatattatccattgttcccggaaacatacagattccggactaaaacaaaaaacttatcgaataataattttaaatgataaataaacaggagggactctattatgaaagaaaaagttgttttggcatactctggcggccttgataccacagcgctgattccgtggctgaaagaaacctttaattacgatgttgtctgctgctgcattaactgcggccagggaaacgagctggacggacttgacgagagagccaagctttccggagcttccaaattatatattgaagatattgtagatgaattctgtgatgaatatattatgccatgcgtagaggcaggcgctgtatatgagcaccagtatcttctcggaacctctatggcacgtccggcaattgcaaaaaaactggttgagatcgcacgtaaagagaatgctgttgctatctgccacggcgctaccggaaaaggaaatgaccagatccgcttcgagcttggaatcaaagctcttgctcctgacatcaagatcattgctccatggcgtatgactgacgtatggaccatgcagtcccgtgaggatgagctggcttactgccaggcacatggaatcaaccttccatttgatgcccgtcacagctacagccgtgaccgtaacttatggcatatcagccatgaaggtcttgagctggaggatccttcccaggctccaaactatgacgatatgcttgtattaagcgtaactcctcagaaggctccggacaaagaaacagagattaccatgacatttgaagaaggtatcccgaaaactctgaacggaaaagccatgaaagtatctgagatcattactgagctgaaccgcctgggcggagaaaacggaatcggaatcgttgatattgtggaaaaccgtgtggtaggtatgaaatcccgcggtgtttatgaaactcctggcggaaccatccttatggcagctcacgaccagcttgaggaactgactcttgaccgtgatactatggaagcaaaaaagaaactgggcagccagtttgcgcaggttgtttatgagggcaaatggttcacacctcttcgtgaggcaatccaggcttttgtagaatccactcaaaaatatgtaaccggcgaagtaaaactgaagctttacaaaggaaatatcatcaaagcaggaactacttctccatacagcctctacaatgagtctcttgcttcctttacaaccggcgatatgtacgatcaccatgatgcagacggctttatcactctctttggacttccgctgaaagttcgtgccatgaagcttctggaagtggaacagaacaaaaacaataaataatcaaaacgaaaagactgctgacagcaaagccccggaacatatccacaggcttctgctgacagcagtccttattttttgtattcagaaaatcagtcttttatctgtatatttctgcttttcagtcttttgtacatccactcacggaacagcgcataaagtactgataccagcgggataaatatcagcatgcccacaactcccataagacttccgcctatggtaactgccatcagcacccacacagaaggaagtcccacggagcctccaacaacatgaggatagatcagatttccctcaatctgctgaagcacaaagaacaaaatcagaaacagcagcgcctgtacaggacttatcagaaaaatcaggataaagctcactgcacatccgataaacgcaccaaaaacaggaatcaaggctgtaaatgcaatcagaacacctaccagcattgcatacgggaaccggaatatggtcattgtcacaaagaacatggttcccagaatcacagcctcaatgcactgtcctgtaacaaatccggaaaaaatatcatttgccagagagcatacatgaagcacatattttacggcttttttgggaaacagagcataaagggctttttttatctgaaccatcagcttctctttctgaagcagtacatagcaggcaaaaacaaagccaataccaaagttcatggctgtatttacaatgcccagagtgactgtcacagtagaagaaagaatattgttgactcccctctgaagccctgtcataacagagtctaacattttctgcggctctatctcaagagaattggcccactccgcaatagcagaatcctgtttgaaattttcatcaatccatatcgtaatatttgtgattccccgctcaatgtttcttccaaggcccatcactgtccgtcccaactcaggaacaactacgtttccaacaataaagatcacaaaagcagctaccagtatggcaagcacaagacttaccggtctggcaatcttacggacaagcttcgtattcttccattttcctctgccgaatacgtttctctcaataaactgcatgggaacatttaacacaaatgcaattccacagcctacaagaaacggaaagaacaggccgacgatcctcataagaaaatcaagtacaacatccagattctgcagacccacgtataaaagcactgtaaaaagaatcagatacatacagtttttcatgttttcttttttaaattccaaaatatccctccatccaggttcttttttctgactggtctcatgtgtctcgtccgggcatttcccggacctgtcggtatttccgatacgacacattctatcacggatatgtttttcttgccagagaaattctttaattttcttcttaaacattttgcacaaatttcaactgtgattttctgcatttccgatagttcaaattgtttgtttttaattgacagaaaattcttttccatatataatataaagcatataaataaaggtatttgcagcagcttatataagtccataatcggttggacgtttctaccaactaccgtaatagttgcctataagtcttattcagggtatccaaaaaaggtagttggaatttttttgctcaaaaccgccctggctgcaaagaagaaaggaaggtaaaccacatgaaacagaattcttcttttgcactaaaaggaaacgtctgcttcagcacagacaaaaacactcttgtctccagagaacatgcctatgttgtctgcgaaaacggaaaatgtgccggagtattttcctccctcccggaaaaattccagggaatcccggtaagagatgcaggagacagtctgatcgtcccgggatttgcagaccttcatcttcatgctccccagtacagcttccggggaatgggaatggatctggagcttctggactggctgaactctgtgacctttcctgaggaatccaaatattccgatcaggaatatgcccggaaggcctactccatttttgctgaggatctgaaaaaaagtgaaaccacaagagcctgtatcttcggcactctccacgtggaagcaacggatattcttatggagcttctggaaaaaaccggactgaagacctttgtaggaaaggtaaatatggaccgcaacggcccggacacactgcaggaaaaaagcgctgaaatctccgcagccgacacaatccgctggcttgattcctgcacaggaaaatatcagaatgtaaaacccattctgacaccgcgatttatcccgtcctgctcagatgagctgatgaaaaagctggctgaaatccagaaacactataaactccctgtacagtctcatctgtctgagaatcccggcgaggtttcctgggtacaggagctttgcccggaaagcagcttttacggggatgcttaccggcagtttgatctttttggcggaaaagactgccctaccattatggcccactgtgtttattgtcctgaagaagaaatacagcttatgaaagaacagggagtatacgttgcccactgtcctcagtccaacaccaacctttcatcaggcattgcccctgtaaagctttatcttgaacagggcattcataccggacttggtaccgatattgcaggaggtcattctctttccatgctgagagctgtttctgactccattcaggtatcaaaacttcactggaggtatatagatagcaacaggaagcctcttacctttgaagaagcattttatatcgggacaatgggcggcggagaatttttcggtaaaaccggaagttttcttgagggctatgaatttgatgccgttatccttgacgacacatatttcccgcatccgcagccgctgacagtgcgggagcgtctggaacgtcttacctatctgtctgacgcccgctgtgttactggcaaatatgtttccggtacggaaatattttagcaatattttaataaaaaagggggtagcattatgaagctcgaaaaaatctttcacctgaaggaaaacaaaacagatgtacggaccgaggttattgccggcgtcaccacatttatgaccatggcgtacatcctggcagtaaaccctaacatcctggaggcctccggaatggacagaggcgctgtatttactgcaactgcgctgtctgcgtttattgcaacctgccttatggctctgttgtccaattacccgtttgttctggcaccgggcatgggattaaacgcatattttgcgtacaccgttgtccttggtatgggttacagctggcagcaggctctggccgcagtatttgtagaaggcctgatctttatccttctgtctctgaccaatgtacgtgaggcaatcttcaactccattcccatgaacctgaaacatgcggtttctgtgggaattggtttgtttattgcatttatcggtctgcagaatgcaaaaatcgttgtaaacaatgactctacactggtaagtgtattttcctttaaaagcgctgtaaaagacggaaccttcaacagcatgggaatcactgttttactggctctgatcggtattttagttacggcagtccttcttgtaaaaaatattaaaggaagcatcctgtggggtattctgatcacctggggacttggaatcatctgtcagttcgttggactgtatgtaccaaatccggagcttggcttcttcagccttctccctgatttctccaacggaatcagcgttcccagcatggcgccaacctttatgaaaatggacttttccattgtgttcagtcttgactttgttgtcatcatgtttgcattcctgtttgtagatatgtttgatactctgggaacccttattggcgtggcatccaaagccgatatgcttgacaaagacggaaagctcccgaaaatcaaaggtgctcttctctctgatgcagtgggaacttctgtaggcgcagtttgcggtacttctactgttactacttttgtagaaagtgcttccggtgtagctgaaggcggacgtaccggtctgactgccattgtagcagccatactgtttggactgtccctgttcctgtcacctatcttcctggctattccgtcctttgcaacggctccggctctgatcgtggtaggatttttgatgctcacatccattacaaaaattgatttcaatgattacacagaagcaattccatgctttatcgcaatcattgcaatgccatttatgtacagtatttccgaaggtatcgcaatgggcgttatctcttatgttgtgatcaatcttgtggccggaaaggcaaaggaaaagaagatcagcgtactgatgtatgttctggcagtactgtttatactgaagtatgtcttcttgtaaaaaggtcttcttaaataaagaacaaaaataatcaggtacagcgcagaacatgaaaaatacgacagatgcccttcagacagcaaatgtttacgctgtgatatataagattacagtcaaaatatcgtattaggataaaaacagcacaggcttatgataaatattcagagcctgtgctgtttttgcgtaaactctccattgtaaagggattccgcaaatgatataatattttttatatgacttaaaaggagaaactgttatgaaaatttttattgtcatgggtgttggaatcctgataggacgttttctcatgacaggaagaatcaaaaaatggaacgaacgtcttgccatgctgtgcaccctccttcttattttttccatgggggttatgcttggccagaaagaaaactttctcagtgaactgtcgtctctgggactgaaaagcttcctgttctttctgattcccactctggtttccattattcttgtctacatactgacaaaacgctttatggagaaaaagcactcagattcagaaggagaagacaaatgatcgttttatttacactgctggccctggtcctgggacttttctgcgggctttccggtttcaatcccacgcctgtcagctttttaagccagcactcagatatgattttatacatactgatgttttctgtgggaatcagcatcggaatgcacaacggcatcctcaaaaaaatccgccagtatcatctgaaaatccttattatcccccttggcattacagtgggctctgtcatcggagggctgatctgcgcagtgatcctgggtatttctccggcagagggcgctgctgtggcaagcggaatgggctggtacagtcttgcgggagttaccatcagccgtctgggaggcgcggaactgggaagtattgcctttatgagcaatcttatgagagaatttttctcttttttcctgattcccattattgcctccaggctcaataattatacctgtattgcgccggctgcagccaccagcgaggatactacccttcctgtacttctgaaatacacaaatgaggaaactgtggttctggctgttcttaatggaattctctgttccttctttgtgccgatactgattacttttttctttaatatttaaaatctgtattattatagtaaaacatccgaggcagttccttttgaaactgctccggatgttttatttaatccagctgaccattctcgatcagacgttctttaattcttgcaaagctctcatcactgatatcatgttccattttacacgcatccgctctggcaatctctgaaggaactcccaggctctccagcattgttgtgagaactgtatgacgttcataaattctgttggcaatctctgcgcctttgtccagaagagtcacggttccataacggtccatagcaatataaccgtcttctctaagaagcttcatggcatggctgacactgggttttgaaactgacagcattgtggcaatgtccacagatcttactcctccgcccttttgggacagccttaaaatcgcttccagataatcctccgccgattctctgatttgcataaaaacacctcccgttccgattattctaccataaatgacacctgattacaacctgctgcccacaggcatataaagctgccgcctttcacagcagcctggtaaaaatgcatcccggaccatctttggtgatggcgttttgccctgtatgtcccgggattttggaatatacatgcctaagtgcctcacgggacagtgacctgaagcatgttgtatagcctccgaaattccgtcatgtttcttctactctaaaacatcctgcaaaataatgccgtgtaaatcataatagcccatcacttgtcgtctccagtaaggcgaagcgtatctcggatttcctctacgtccatatccaggatcactgcaagctctcccacactgaatgcgctttctccgtcttcttcatcctcagaaagctctctcacagcgctttccagcttctccaccctggccaccagactgtcatcctcaaattttctctggctctgctccttgcaggccttacggattccctcacggatctgttccagaagccattcctcactgcgcagaatctctccggcagcgccaagagcctgtacaaggcttacattggcctcctggatcagatccccgataaagatatcctctgtattcatttccacagcaagccttgctgccgcacgcatatagcaggcagcaaggctctgtacggcgtctgcgcttccgcttctaagttcttcaaaaagccgcccgctttccggaaagtcctcttctccgggaaggctttccagatattctttcagataagcctcctcttcctgtgtcagaggaacccggcgtacttcctcctgagcgtctgagccctctgtctctgtctcaattccctctatcaggattccctgtccggtaagatatttaagcacgttcacaagctgactgctgttcagatcacttcctgagaattcttctctgatctgctctgccctgagacttccgccctgctctttggccagttcctgcatttttttaagtttttcctgaaattcacgaacatccattgctgttctcctttttttcctttcgtcaataaactgattccgggttaaaatcatttattatttctcacgccattcccagtaacctgcgaacagttagaatcatttttcattataacatcttcccggactcttttcacccaaaaattaccggctgagacattcatcgaaacaatctggctgctgtttacacagcattttgaccagattgctgtaaacaacgggcatatccacaggctgagccgtcagccgagccgtcagccaagcttgtcctcaagagccttaatggactccatattgtatttttcatattcgttaaaaataccgtctcccattgcgtcaaactctgccggcgcatactttggaacataccaggatctggaatcaaaatactgctgtatttctgccgtatcaaacatccttccatgtctggcaaaaatttcatttctcgccagccccagctgttctttggtcagccccttgctgataagtgtctcttctgtaagatattcgctgttactggttggcagtatgtattctccggctgccgcattgttctccggagacggctgcacctgtccgcctgcagctcctctgttttttcgaagagacaggggaacccagtcagagctgcttccctcctggtgaaaatttcgtgtgtaggaatccccggcaatatccaccgtataatatccgcctcttctgccattgcagataagcttattttcgcaaaaataccatggacctgcggactcgctcagatgcagcggctccccgatctgacggacagttcctccgttgtttccgtaaagaacaatatcatatcccaactccggtgtataaatgtcctcatccatttcggaaaaacctgttgctgccactaatatggattcctgattttctccggcatccactatggcataataatctcccacatgatttgtttttaaaaactcctcataggaacctgccacagataccgtatctgaaccagcgctttcctcttctgtatgtgtctgatctacaatctcccggatggacgaggtatgatcttcaatatccatccagaagccctccagatatctttccgattttaatctgtcatatacaaactgacctgctgactgcccctcttccatactgtctccgcgcactaaccgcacaatcgaataacagcggggatcctggctgactgttgaataaacaataaaattttccgtacctatacctatacgttgagcctggaatcccaaggctttatactgctctatcatatcgatcgtatactgtccgtaatccagtccctgaagcggtgttggatctaaagcaaataaagcttcgagttccattcccgatgccgcatattccatatcctgagtactttccataactgagaaggctgatccgtcataggtatatcctcttaaataccactcaaaccctgtgaccagatatttgggagatgcgctgtactcataaaagaactgatactgtccatttacctttctcaaaaaaatatttccctcataggcagtggaattcgtatcagacattgccgccagatcctgaaacttcccttccagatcatattctgccagctcaatcatatcggaaaccatccaggtatccacgtttaattcatacatggatatcctgacacatttattttccggcccaaaggtttcacttggctcataagtaactgccagaatttcatcactgttatcattatcaaaatcccatttcagacatccgagaattccttcctcctgaacattctgaagtttcattatctcatcctgcatgatcaacggcgtctccagacgctgtccgccaatatagggaagtccggtcagccgggatacgatacttccggcgtcttcctccttctgctgctgaacctctgccctgtcttctgccgcccacaggatttccccgtttcccagtgccagaacacaggtcaaaactactgcagttacatttttcatctttttcatacacatagtctccttcctgctattgaaactacaaccctttacaaaaatcctgatcacattcccatataacttctgttgtatttgtgtttgacagcatttttaagcggaatgtctgtcctgcgcaatttcttttttcagaccctcagtccgctttttccgggctttccaggccttctttttcttttttacagagaaacacccggtaggggagctaccgggtgtttcgaggggagtataaataattaaataaggggttatgtaaaaaaaatttttgaagggtaaattctttttacagattagattataatataaactggaaaaaaaagcaatatgatttcatgaatattattacaactttttgacataatagacagtgtaataagcaagttgacaaaatgcattccaaatcgccttaggtgacaggaagcattttgccctgtatgtctcggggttttggcacagataccaaaataccctgcgggatagtaaacagcagctattcaacacattacaccaggaggaaaatgaaaatgacaaaaaattatgaaacagaaaacaaaaacatgaacagcaacacagacaaagcttctgataaaagcgcacagaactgcggaaaaaacagttccaaaaacgcttccagaaacagctctaaaaacaaaactacaaacgcttacgacagagaacagaacaattactctgacagatactaaagaaaaaaatcagcaaaaaacaaacgtttctcccttcttacagaaccgtatggacagggcggatgcaggcagatgccgcatccgccctgtcctgtcttccgatctgtttctccgtcctcttttctgcatatgataaataaaaaaggaaaactcaaatgtttcccattgaaaccatttccgccaaaatgcttgattattatgcagaccgttccgacgctctcatcatagacgtccgcgatgcagccctttatcagaaaagtcatatccgcggcgcgttaaactatccttacagtcagattgaacagtgccgggagcttccccgggaaaagcttctgatcttttactgtcagcggggcggctcaagtatggccgccgccaggctttttgtaaaaaaagggtacaaaacccggtctgtgatcggcggttttgaagcttatcgaggaagaaatcttgtaatttccggataaccgtgataatgtaaaagagaaaaatcctgttctgtaaaaacagaacggattttatacaaaacacctattataaggagaatacctgaatgaaatacttgtttgcatcagatatacatggctccgcatattactgccggaagcttttggatgcgttccgtgaagagcaggcagaacgtctggttcttctgggcgatctgctctatcacggacccagaaatgatcttccaagagaatatgcacccaaagaagtcattgctcttctcaatgaacataaaaacaaaatttacgctgtccgcggaaactgtgaggccgaggttgaccagatggttctggaatttccggtaatggctgactactgtattctttctgtagacggaagaaccttttatgctactcacggacatatttataaccaggacaatcttccccctctccaggaaggagacattctgatccacggacatactcatgtgttaaaagctcagcagatggatggatatatccttttaaatccaggctctgtttccattcccaaggagggaaatcctgcaacctacgcagttctggaaaacagtatatttactattaaagattttgacggaaacactgtcagagaaatgaggctgccatgaaatatatggaactgatcgctccctgtcattttggaatggaggctgtcctgaaacgggaaattcttgatctcggctatgagatcagcaaagtggatgatggaaaagtaacttttctggctgacgctgcgggaatcgcacaggcaaatgtatttctccgcaccacagaacgtattcttctgaaagcaggagaatttaaggcggtgacctttgacgagctttttgaaaaaacaaaggcaattccctgggaaaactacattcctcaggatggaaaattctgggttgccaaggccaactccgtaaagagcgcacttttcagcccttccgatatccagtccattatgaaaaaagcaattgtagaacgtctgaaaggcgtttacggtatttcctggtttccggaagacggagcaagctttcccatccgtgtatcttttatgaaggatgtggccactgtgggcattgatacctcaggagtatccctccataaacgcggctaccgtcagatgactgtaaaagctccgatcactgaaactctggcatcagcccttattatgcttaccccatggaataaagaccggatccttgtagatcctttctgcggaagcggaacctttcctattgaggcagccatgatcgccgccgatatggctcccggcatgaaccgctccttcctttctgaagactggaagcatattgttcctcgaaaatgctggtatgacgccatagaagaagcaaacgaccggatcaaccttcatattgaaacggatatccagggctatgatattgacgcagaagcgctgaaggcagcccgttccaatgccaaaatggcaggcgtggacaggctgatccattttcagcagagagcagttaaggatctcagccacccaaaaccatacggcttcctgatcacgaatcctccatatggagagcgtctggaagaaaaagcagctcttccgcagctttaccgggaaatcggagaaagcttcaaccgtctggataaatggtccatgtacctgatcacgtcctatgacagagctgaaaatgatattgggaaaaaagcggacaaaaaccgcaaaatatacaatggaatgttaaaaacctactactatcagtttctggggccaaaaccgccaaggaggaatgcaaacaaatgaaaaaagtaatttttgccaccggcaatgaaggaaaaatgaaggagatccgcgaaattctcggtgatctggatatccggcttctttccctgaaggatgccggaatcacagctgatattgaagaaaacggaagttcttttgaagaaaatgcagtcatcaaggcaacggctatccgtgaccttaccggagagatcgtacttgctgatgactccggtctggaaatcgattacctgaataaagaaccgggtatctattctgcccgctacatgggtgaagatacttcttatcatattaaaaatgcaaatcttattgagcgcctgaacggagttcctgatgaaaagagaactgcccgctttgtatgcgccattgcagccgctttcccggacgggactgttcggacagtcagagcagctatggaaggcaggatcggctacgaggaaaaaggcgaaaacggattcggctatgaccccattttttatcttccggaatacggatgttcttctgcggagctttctatggaggaaaaaaataaaatcagccacagagggaaggctctgagggctatcagggacgagcttcaatgaaactccttattgtcagtgacactcatggaagagacgccaatctggaagctgcggttctgagagagcagccttttgatatgctgttccactgcggagacgtggaagggcgcgagttctacattgaagcccttgccgaatgtccctgtacaattattgccggaaacaatgatttcttctccgaccttccaaaagaggatgaaattactgtattcaaacaccggatccttgtaacccacggacatttttacggcgtttctatggatctttcccgtctgattgatgaggccagatccagaaactgtgactgtgtgttcttcggtcacacacataaaccagttattgacgaagaggacggcatcatggtattaaatccgggaagtcttacttttccaagacaaaacggacataaaccaagctatgctgttgtagaagcagacgaggacggaggtctctctgccgaaatccgttacctctgataccacaacgggacaaaagtcagtcttacttttgtccccatacttttatgtccggcagttgcttgtcccgcaatattcttattcctgctctgagcaggtatgctgattttctgcaagaagctctttgatttccggaacagaccttccggcttttctctgctgccgtatccattccacaagctgtatgctctgttctctccggtaccttcttgtcaggttttcttcttcctgctcaaaaggcagcattccctcctcagtataatgcttcagggtactgtaacgacacccggtcagacgcgccagctcccctatggaaacatagtctgaagcaagaatcgcttccattgttctccgtctggacatattttatatgccccccttcaccggtatacaggagaaagcagcgctccctgaacaggaattccctggcatgaaacagttttggggacaatgcggtaaaatatgttgtctatttttaaaagagtttctgttccattctttacttcttccacaaaatgcccgtgttcgcataaaaaactcatcattgccgttctgcggtcactgactgtagttccaaaaataacaaaatcaacaaacacagcctgacgcctttccagaaacggaaaagtaagatttaccccctgcatataaggattctgaaaaagttttttctttttccttaaaaaggctgtccccagactttcaaaggctttatgaaattcctgattccacaacacacctgtccactgaccggatgctgccatacgcaccattttctgagatatttcttcctgttcttttgccgaaaagatctcatggataaatccactttcacgaatcatccacagaagcagaatcccatcatcggtcagctctccttcttccagaagttctgctcgaagggcttctgtcaccttttggtaaatatcctggtcacttctgtacaccatcagatccacgcctgcagtatcgtaatacatatcacagcccagaagatccggaacctcatccagcgctccccgggatatcaaaatccctatatcctctccggcctccttattcaaagcttctgttttcagggattttacggttttcatttctttttccagtttgtctgcaaaacccgggctttgacagtcaccggaggcaagaagtctctctgcccgttttcccgcggcagctgcgcgaagaacagcacttttggcaaccgatttatgtctgctgtccgttccatctagtcctataagaagaaactgctgtacaagtgtgtaatcgtccatatttttctcctttatttttccttacatttgatgccgtagttaccccggctcccattttcatagccctggcagatctcataaacttttccattgatctctacctcatcatcaccggtaaaggtacaggaatctccgttcttttcacagtactctgatattgcctgcatggcttttaccatagtaggatattctgcgctgtcctcataaggaatccaaaaagcttttttaaacatatccttcacctctcttacttcatatttcttattacttactacttataatttattatatactctctcttctgaaaaaagtcaatatatttttatatttttctgaaaaaattacagggcggtactcctgtgaataccgccctgatctctgatatataactataaatgtgcaaatatcgaattttgcacaatagaatccataatatacgcacaaaaaagaaatattaagctctatatgtgcattaaataaaaacaaattcgtgataattttatgcactttttcaaatttactcataaaataaattccatactttttgaatcatcaatatttctttattatgaaatatgaatatctacaatttcattacttgttccgattctcaccggaagctgaaaaaagcctgctcctgaagaaataatggcatgcgtttttccaaactgctcatgtccataaaaataatgttttccatttgccagttttgtaaaatatgttaccggaaaaaactgtcccttatgggtatgaccgctgagaaccaggtctgccccaaattcaacggcttcaggaataccactgggattatgatctaaaactataaccggtaagctcgaatttatttcttttgccagactttccattgagcttctgcaattattacttgcatcggttcttcctgccaggcagaaatcttccagttgaatcacctgattatgcagaagctgaatgtttgaagcccgtaaaaaatcagcaaatttcttattatctgcctttggatcatgatttcccagtacggcaaacacgcctttttttgcctttattttacaaaacagggagctgattctgccaagaacctcatcatcctcaagaatatgattatttacatcaataatatctccgcatataactaccagatcaggttccagccggttcactttatccacaatattctgaatatgcttctctcctacaaacacacccagatgaatgtcactcatcatggcaatccgacaggtatttcccctcaatcccaaaggaatggaataagcagtatattttatattttttgcatgaagatacccaagcgccacaattataacagccgaaatatccagaacaaatacccccatggcctgcgcttttccagaaaccataaacagggcagaaaaaatccaccataaaagcagaatcataaaatcatatataaaaaagcagctatatatacccatcagcatttcaagcttcttatttctccacttttccatgatctgattctgcatgagagctgaaatccccatcactatataaattatgccaattatacaggaaacccctgtactgactcccagggtccagactgcatagctgttcataaccgcaccgacaactgaacttaataagataacaacagaaaaaacttttttgaaaatcttcttctcgagaattttaccaaatgctgtgttcatcaccagtcatctcctttttctgatccttgcacagagcatactccatgatgcactttttattatttccaaaaataattaacaaaaaacgcctggaatcaggcgtttttatgcgggcaacaggacttgaacctgcacgtcgtagacaccagaacctaaatctggcgcgtctgccaattccgccatgcccgcgcaatatttatatcattcattttaataaaatgatgataacctatatgataagaaaaaagcatctgtatctctacagatgcaagtgaggcatcggggattcgaaccccggacaacttgattaaaagtcaagtgctctaccgactgagctaataccccataacagactgggctagttggattcgaaccaacgaatgcagcagtcaaagtgctgtgccttaccgcttggcgatagcccaaaggcgaaagggtggatacagggattcgaaccctgggcctccagagccacaatctggcgcgctaaccaactgcgctatacccaccacagcgtgcctgaagggattcgaacccccgacccacggcttagaaggccgttgctctatccagctgagctacagacacatttctccttttatggagaagcgggtgatgggaatcgaacccacgtatccagcttggaaggctggtgttctaccattgaactacacccgcatattcgctgaaacggtaaaagttgtttacagcatcggggtgacaggattcgaacctgcggcctcctggtcccaaaccaggcgctctagccaagctgagccacaccccgtaacggtatttaatttttgttttctcgcttgacgcaagatagattatattacaggtatttataaaagtcaacactttttttcaaaaatttttgttttttattttcggggagaaatgtaaaagtaacttccggttcttcttcacacttccggaagcttatatttcattaaggctttatgaaagacttatttccggttattctgtccgccggcctctattgcttcttttccagatctgcaaaagaggctgacgctttttcaaaattctcttttccctgcacagtaagcagcgctttattacaggaaacgggtctgccctccagaattctccttccctgctcataatccatataaattccatccgaaggtgacgtcagccgcgcagcggcacagcagtccctccacccagtctctttctgcacagtgatgttctgtccggatgttgtatctgctgccatatctgtactgtttttatccttctcttcagattctccccggggaatacttcttattacagaagactcgctctgatctgtcattctgtactgcagatgtttttcacttccttcccagaatttctgtagttcctttttggaaatcctgcgtccgtttccatctgtcatagaggaaagtgcatttttcccaatcagcagaaccggtgtattcccaacctgtattttatccggtccatttcctttcatatgaagttccgcaagatctgccgcctgaaatacagtattcattgtatactctcccagcctcagttctacaggaatctcctgcaccggagtaaaagagaccagcccgtctattttctgcacttccttcagtaatttctgatcataaactgttttcccaaaggaaacaatctcctgatattctctttgttcttccgggatccctgccgccagataaactgccagatacaaaacgcctgcagccattgctataccggtcactgtcagcggccggaaatgtttccttttacttatgctcaccggccgcctcccttcgcgcctcctccaaaagcattttctgccttctgtttcttatcacaagtccgataataatcagcagcattcctgcgccggcaacaacaaaaacagaataccaccaggaatttgcctttttgggagtttctattttcagactctgtatttccggcttattaatctgcgtctgatattctgatgtttcctgataaatattcccctgcagatcctcatagcttaaagtaagctttccgcttacctttccatacatttcactttcatccgttccctcatcctgtcctgctgccttcatagtgcgggttcctacataaatgctcatagttccttcagccatggtcccggcatccatatttccaacaaaaatttcctcctttggaaacatcccctgcccttccaggtccacacgcacattataaatacctgttctgctgagattctgcacccggactgccagatctatggtatctgtagaatatactgttgcaggaatcccttcacagtcaagaaccgccgtcactggctgtgccacccggatctcaatactttctgttcctgtcgcagcttttcctttcacatcctcatattcaaaagaaactgtcaccagaacagggccgtcctttgcatcctttgtaatacttaccttactgttaatagtaatatctgcccccggatttactcccgaaaaataaaaggacttcttttcaaactgtatggatggcgattctgtactaaaagaaactttcagattataaataccctgactgctgcttctgttcttaaacaccagctccatatctgcctggtctcctgcgttcagagctttctctgaaaggttaaagctttccagaaggagtctgggctgacggatcagttcttctttctgttccgcagacatctctccccctccggaatatcctccggaaacatcccctcctgtgtcttcaggcacagaaccgtccccgaaaagatcttcctgaccgtttgtataaatgttcagattctcaatattcatggacattcccggtccaggcgtgggatccggaataacacttggctccggagttacgctgggttccggtgatggcgatacaccgggctccggtacatcagtgggaaccggcgctaccgtaatctccggctcgtctgtgtccgcgctttgttctgctcctgttctttctgttccgtctgcaaacaattctgctccttgcacgatccggctgcccgttccggccaggatgcctgtctgagtcacccagatatcgctgttcccctgcagacacaggatttcaccaagaattactgcagacagcaatatcgctgtttttcttatgttccttttcattctgccgttcctctttcccttaaaattcctccgtccatctcaaaaacccggtcacagaggatcctgatgtcttctgcgttgtgacttgccagaagtatactttttccttcctttttcagttccagaagtattttgcgtatctcttctactccgtgcttatccagaccgttaaacggctcatccagaatcagaagatccgggtcctccataatcgcctgtgcaattcccagacgctggcgcatacccagagaatattttgccacagcttttttcaggtcagggtccagccccacctttttcagcacaagccggatctgagcggctgtgatccggcggttcatatctgccagaatctccagattccgaaatcctgtcatattagtcagaaagcccgggctttcaataatcacacccagactttccggaaagtctgtatcctttccgatctcctttccctgtacccggatcactcctgaggtcacgggcaaaaatccacagatacacttcataagaactgtttttcctgatccattatttcccacaataccgcagacctctccttttctcagaataagatccgcctccttcagcacacagtcctctccaaaatattttgtcacctttaccgcctggatcaccggctcagatctcactaactctgtcatacagaatccctccatgaaccaccatgacaagtcccagaaaaacaagaagaaacagccatagccccatactgtctgctccccatttagcagatccttcaatccactggggcggatacagccacagtgcgttttcaaagtatctgtcccttaatatcacacagaaataataggacacaaaaggcaggccaaaagccagatacacggagcctgtcagggctccgcagattcccccgaaagtactgatgatgcctcccagcatcccgcagcgtaaaagaatctctgtaagctcccacacagaattccagggaaaccttccctgttcctccaaagggaaaaacactgcaaaatatataaaaaacatcagcgtgcctgccaggaatactgccagaaatcctcccagagctactgtaaacactttgctctccacataaacccgcctccctgttctcggaagcgcagatttcagaaagccgccctgacgttccagaaggaaagaatcgctccaaggaagaacagcagccagaggaaacagaaaaatcattgtctgagatttcagcgcctctgcttccatattcacaaattttcccgtatccagaaggccctctattttaggataagctgcgccaaaaacaattcctgccattgccacagccagccccatccagaagccttttcccagaaacattcttctgatctcactgcccatctcaatccttttctcctaaaaacacaaaatgatagtatttcatccgtcttccgcaaaaccagatcagaactccaagcagaatcagaaacaccacacaggactgccatactgttggaagcctgtcatatccaaaattatgcctgccataagaggcatgacttaaaggactgatccatccgatcagcacatttacccggaacatctcatattcttcaaatcccagaagcacccgaagcacctttggctccagaaggaacccgtaaagacagaacaaaagccctgccaccagtccacgatttttccccggaagaagatttcctgccagcacaataaagctcaggcagagaatataaagaaacagcaggagaataacctgagcggtacatccgtaaggagtaacactttccattacctttaccgtagaaggaacatttaagtcctctcccagcttagaataagccagcatagccgctgtattgctccagatatttcccggatatcccacttttgcacaaaggatcatggtggctcccagcataaaaaccgtgtaaatcccagatacggccgccacataaaaaagctgtccgaaaagccagcgcttttttgtggtgcggcacaggtaatacggggtaatagcgcttaatacaggaaggtcggaaaacaaaagcaaaagaagtacggagcttaaaagaattgccgttgtatctccaaaggtccacaaaaaaggttccagcatctgaaccggcgacttatatgcctggattaccggcataatccggctgctcaacagaaaacagagaataaagcccagcaaaaatgtcagaatcaccttgggctttttataaaatcccataaaattgtattggatcactgctttgatctgcctcattctctgcccgtctccttctgtattgtttaatatccaagtcccctgtcaattacgctgccgtctatggcattaatggtaagataactcatgtttgtatcataatttccaaatgtctccggagcgccctgcgcctgctgttcttctgtataaaaaccctcaaagcttccaaaaaagtcccacaccggaaccagaactccggatttgctgtctgtagcaggttcataaatccggctgtagccaaaggtgatccgttcaatatggtaaactctgccgtcttcactgtttaaggtatctgcattttgtatcagcatcattttttcataaatatccataatctcgtcaaaggatttcaggtttacgcgttctgttttcacctgtccgatatcatactgattgataaattccacctgatcaattccatcttctgtcacacaaaaatcaagtctttcatagctccatgtttccatctcactgtccatatcttccagcgctcctccatactccgaagaatatgtaatgggaattccatccactttccttgtataatgcattatataacctgtatcactgatatgaatatcctgattttccgggctgtttgtctgataggtgcaaagtccgtattcccagtctgcaagctccattcccggaatctgaagggccgcaactttttcgtctgtcagagcttttgcctcctcaaaggatataccaatctctgtttccatttcttcctctgcaggaagcggctccgccagatgaatatcattatctgcggaaaagctgtcataactgttccagaaaaataatgcatctgcctgttcactgtgttcgtattttttgttattttcaatctttactgacatgggagtacttccagaggagttcagtatataacgaaatggagttccgtcttctgtcactgctactccaataaaattatcctccattatgtaggttccgcccattccatcatctgcttcaagtccgaactgaggcttcacctcctccagtactttctcttccggcgcattttcatattcctgttccagattttcaatcacctgataaatatccagattataatttccgttttcatcctttccccagccgttgggatccatatttccttctgcaagatatcccttccaggtagtcagctctttcagaacctgctgttttgttctggtaaaataactggaacttgtataaatctttgcattcttaaaaaaagtgtctgtaatgcggtctatttcctcctggttaaaaggatgctggctgactgcaatggcagaagccttttctgcctcaggaatctccaccactgcattggtatcaatagtgagctttccggtctcatctgtcaccgtactctgataagtttccggagcgcctacaatatcccgaattgtagttttatctgtgttctctgttccttctgcacctgcctgaccttcaggtatctctgctgcttcttcgtaatttttttcgactgcctcttttcctttcatttttacaagagaatcctccggagtctctgcacatccggtcagtaatacagtacttatcatcatccccaggatcagcgccggcgtttttcttttcatacgatctcctctctatgtctgactgtgccggtcctgccacagtctccactggttttattgttttactaatatcagaatatcacagagcattcttccggatatcctccaaagtgtaaccattctgtaaccgctgaaaaataacagaagtacctgcaccctccttgcttttgattataagctgcgctccgtgaagcccggcaatctccttacagagggccagtcccaggcctgcccctccagagcttcgggatctggatttatccaccatataaaaggcctccgtcacacggttcagttcctcttcaggaatcccccgcccctgatctttcactgtaatgccctgttcgtctgcatgaataaaaattttcccaccattttcagaggctttatacgcattatccacaagattcacaaaaaaactgaccatcatatcctgatccatttcccaggacagattctccggaatgcactccgtttccagatcaatgtttttttcactgagcttgaacttcatcaactgtcttacattgtccagaagctcccttacctggcatttttcaaaatccactgcctgttttttttcttcataaaggcctgtcagctccagcatttttacagaaagcctggacagtctccgacattcgcgtcctatataagtcagggcctgttcccttcttctgtcgcttaaacggactgtcagaagcgtatccgcatatccgataatggcagtcatcggtgttttcagttcgtgggcaagacttcccagcattcttcgctgagtttcatttgtacttgtaagagcttctatgttttcctgcactgtcatagccatatgattaaagctttttgcaagctgtccgatttcatcctttctgctgtcatcaacacgtacctgataatttccctcagaaatagctgcagccgcgtctttcagctgaaggagaggacgtatcgtataagaaagacttctgtacaggatgcctcctgccagaagtaaaagaataagggtcatcatcagtccctttgcaaaaagtctggcagtacgttcatagatttccgtaatatcattataaaacacaaccgtataaggatttcccatatacatttctgaactcataagaatcagaatcttcttatcctctactttctgtacaggaatactgtctccctctgatcttttgtacgtattttcccacagttctttataattaaattcataagggctggaattataagcacattcccccttataaaacagagccccgttgcttccaaaaacctcccggaaaacattgatcaattccagacgtatcacatctgtctctgtattccctgtatgaaaaatcaatcctgtactctccagccttctgtccatttctcttaatttatttgtatactcagtctgctcatttttcctccagtcatttactgtctgctgctgagcctcatacaaaaaatatatcagtgtagcctgagaaataatcacgaccgccaacagcgcctgaagaaaaattcttcgaaaaagcttcactcatccacctccagtctgtatcccacagtaggtattgtttttattacatttccccagcccagcttttttcggatacgtcctacatgagcgtctacagtacgggtttctccctcgaattccattccccacagagttccgagaatctgtttccttgtaagagctttgtttttgtgccttacaaataacaaaagacattcatattccatgggcttcaggtaaacctcctgcccgtcctttgttactgtccgcttttctgtatcaattactacatcgtagatctggatcagactgtttactcttccatttctctccagaaccttttctatacgcaccaacagctccagcatttcaaagggctttacaaggtaatcctcagcgccctctttcagccccctcaccttattctgtacctcgcctctggcagttagaaagatcaccgggatcccatgggctttcagttcaggaagcagggcaaaaccgtcctttcccggaagcattacgtccaaaagggcgcagtcataatcatccttttcagaaagacctttacttgcctcgtttccgtcaaaaaaagcagtcacctgatatccggttacctccagattcatacagatcagatcattaattgcctcttcgtcttctattaccagaatatgtgcgctcatatctcttcctcccccatatcttatgtcctataaatgaacaaatatcgaattttgcacaacagaatctgtaatattaagctctgtatgcgaattttacaaagacaaattcgtgatgattctgtgcagctttttcaaatttgcgcatttatagttctgtccttattattgcactcattctatcattgtggtgtaactattttgtaaatatatggccaaaatacttttggaagcagaaaaacgtacagatgaaagctacagctaaacacactgccccaatcacatatagcatctgtgcatgcattcattatgtcagatacgcggggggctcaccctatcctggttttaacatatgatatagagaatttatcaaatttaatgaggtcctttatgaaaacggaaaatagatgcagctttgaaattgattattctgaaattcccggtgaaaagattcttccctttacggtttccttaaatacagagtaatctgttttatacccctctgaaggtcagctccagaaattctgctatcttattacaggtgtgggacaggacttgccccaatatgcagatttaagtcattttctgctgaatatctgcagtaccatcacccgggaggatatttcagaaattacagtttccattaacgatgatcctcagacaattatatggggagaaaatgtagaatttaagacaaaagaaaatccagatcctccaacagaatgtattggattaaaatttgattttcctttaaataaagaaattggttatatgaaaatatgtttttcgctgaaaaatatttatcctgtaggccctgttgatgtgtgcctgttcggaggaggaaccacggcaacaggtctggcaatctgtgggcctgtatgcagtgaaacaaacgaatgtgaatcgttatttaaccataaggaaaccgtctgtgtccctgttactgtgactccctttgccagacctggggctgcaagaacgatctgctgcggaaagcctgagatcagcacagaaacctcctgttatggagaacgtacctcctgttcctttactgtttcccaggaactttgtattgagcttcctattacttttggcgcgcaggtagaaacaggctcaatatcagtacaatgtgacggcgtttcaaacggttcctgcaactgttcagatgaagaaatgcaggaacttccttccaaagcgcccctgactcagagagagcggcgcttcttcagtcgttaaacagaatttgagaaatgtatagcaaaacacccgtaaatgataacatttacgggtgtttaaacctccccctgttggactcgaaccaacgacactgcggttaacagccgcatgctctaccgactgagctaaggaggaatagaaagtattgcactttcaaaactacatacatgttgacattagaatcatttttgaccttgctttcgctttctacgactcgcccggtcatctcgtgacttccgccactcaatgtcatttgcttcgcaaatgctccgtccagtctgtgaacatccctctgtgagtaaactcactccgctctgttcccttcctgtccgtcccgctcgtctcagctttttggtcaagccctcgaccgattagtagcagtcagctccatacgttaccgcacttccacctctgccctatctacctcgtcgtcttcaaggggtcttacttctttcgaatgggatatctcatcttgaggggggcttcacgcttagatgccttcagcgtttatcccttccaggcttggctacccggccgtagacttggcagtctaaccggtacaccagcggcccgtccatcccggtcctctcgtactaaggacagctcctctcagatatcctacgcccacgccggatagggaccgaactgtctcacgacgttctgaacccagctcgcgtaccgctttaatgggcgaacagcccaacccttgggacctactacagccccaggatgcgatgagccgacatcgaggtgccaaaccactccgtcgatgtgaactcttgggagtgataagcctgttatccccagggtagcttttatccgttgagcgatggcattcccacttaataccaccggatcactaagccctactttcgtacctgctccacccgtcggtgtcgcagtcaagctcccttctgcctttgcactctgcgaatggtttccgtccattctgagggaacctttgggcgcctccgataccctttcggaggcgaccgccccagtcaaactccccgcctggcattgtcccaccgccgggtcacggcggatggttagaaacccaatactgcaagggtggtatcccaacagcgactcccacacaactggcgttttgtgttctcagtctcccacctatcctgtacatgcagcaccggatcccagtaccaaactggagtaaagctccatggggtctttccgtcctggcgcaggtaaccagcatcttcactggtacttcaatttcaccggatgcattgtcgagacagcgctcaaatcattacgcctttcgtgcgggtcggaacttacccgacaaggaatttcgctaccttaggaccgttatagttacggccgccgtttactggggcttaaattcaaagcttcgcttgcgctaacctctcctcttaaccttccagcaccgggcaggcgtcagcccatatacctcacctttcggtttcgcatagacctgtgtttttgctaaacagttgcttgagcctattctctgcggccaggtctccctggcaccccttctcccgaagttacggggtcattttgccgagttccttgacaatgcttcttccgccggccttaggattctctcctcatccacctgtgtcggtttacggtacgggtacggtataaactatagcggcttttcttgacgcacagctcacgggcttccctactttctttcggtccgcgtcgtgtcttcccattgacacacggatttgccaatgtgtctggtacctcacttgcaccgggctttccattcccggctcccgctttctgcacgtgtccccacagttctgttataccgcagtacaggaatctccacctgttgtccatcggctacgactctcgtcctcgccttaggccccgacttacccagggcagatcagctttaccctggaaaccttggatattcggccataaggattctcaccttattctcgctactcattccggcattctctcttccatgcagtccacagctccttacggtactgcttcgtcccgcatgcaatgctcctctaccaatcatttctgattccttagtttcggtggcgcgtttcagccccggacattttcggcgcaggacctctcgaccagtgagctattacgcactctttgaatggatggctgcttctgagccaacatcctggttgtctttgaaatcccacatccttttccacttaacgcgcactttgggaccttaactgaaggtctgggctctttccctttcgactgcccaacttatctcgtgcagtctgactcccggtaagcaattctgcggcattcggagtttgatattcttcggtaggctttgacgccccctaggaaattcagtgctctacctccgctaatctctaccgaggctagccctaaagctatttcgaggagaaccagctatctccgggttcgattggaatttctcccctatccacacctcatccccacccttttcaacggatgtgggttcggtcctccactgcctcttacggcagcttcaacctggacatggatagatcacccggtttcgggtctgccctcactgactctggccctcttaagacttggtttccctacggctccggtccttaagaccttaaccttgccagtaagcgcaactcgccggaccgttctacaaaaagtacgcggtcgtgcatataaagcacttccacagcttgtagacacagggtttcaggttctctttcactcccctcccggggtccttttcacctttccttcacagtactatgcgctatcggtcactaagtggtatttagccttagggggtggtccccctcacttcccgcagggtttctcgtgtcccgcggtactctggatcctgctcagtctgctctgctttcgcgtacggggctctcaccctctccggccggctttcccaaaaccgttctgctagctttacagaatcttaaatgcagtccgtaaccccagcgtgcacgcacactggtttaggctcctccgcgttcgctcgccgctacttacggaatcgagttttctttcttttcctccgggtacttagatgtttcagttccccgggttcccctccatacgttatggattggcgtatggatacatgaggtttcctcatgtgggtttccccattcagagatctccggatcaatggatatttgctcctccccgaagcttatcgcagcttatcacgtctttcttcggcccttagtgccaaggcatccgccctgtgccctttctgcttgacctttcgcttttcatcaccctagcgtaggtgatgcggtctttgattctcattgctgataaataaatttatcgatgtcttcctatcttacgttttacgtttgtatcaaggatcttcgtgtaacttaagtaagtgcacaatcaaaggataagtatgttggaagcttgcttccataaatgcttatcatgcagattgtatatgcgacgcagtcgcgaccgaggaacctttgttccgaggtgcacttacaatcaatacacaaagttacatgtatgcagttttcaaggtgcatgtctgactgatcttttatcagtcatcagaatccgtaagcttccttacaaactctaatcactggtaaaaccaccagttttcaacagctcttcccggctggttcgggttagcaccggacctctcaaatctcttctggctccactatgtttccgacatagctcactttccagtgcctgtatttatctcaacaggtctccctgtttttctttttttgatctggcggccacctgctctcccacatcgtctccaatgcagtaccatcggccgcttgggtcttaaccgtcgtgttcgggatgggaacgggtgtctcccccaagcgcatcgccaccagaagcagagtacttaatgagtacaagatttatcgccgtacgaatttagtacggactccgttccgaggaacttaataagcccaactgtaaggcagggcgagtttagtgaacggaacttccttgtttccccttaatacctagacagtgaaacacatctctctacttcttcttccttagaaaggaggtgatccagccgcaccttccgatacggctaccttgttacgacttcaccccagtcatccgtcccgccttcggcagctccgtcctttcggttcggtcactgacttcgggcgttactgactcccatggtgtgacgggcggtgtgtacaagacccgggaacgtattcaccgcggcattctgatccgcgattactagcgattccagcttcgtgcagtcgagttgcagactgcagtccgaactgggacgttatttttgggatttgcttaagctcacactctcgcttccctttgtttacgccattgtagcacgtgtgtagcccaaatcataaggggcatgatgatttgacgtcatccccgccttcctccaggttatccctggcagtctcctcagagtgcccggccaaaccgctggctactaaggataggggttgcgctcgttgcgggacttaacccaacatctcacgacacgagctgacgacaaccatgcaccacctgtctccgatgctccgaagagaaggcaccgttacgtgccggtcatcgggatgtcaagacttggtaaggttcttcgcgttgcttcgaattaaaccacatgctccaccgcttgtgcgggtccccgtcaattcctttgagtttcattcttgcgaacgtactccccaggtggaatacttactgcgtttgctgcggcaccgaatggctctgccacccgacacctagtattcatcgtttacggcgtggactaccagggtatctaatcctgtttgctccccacgctttcgagcctcaacgtcagttaccgtccagtaagccgccttcgccactggtgttcctcctaatatctacgcatttcaccgctacactaggaattccgcttacctctccggtactcaagatcaacagtttccaatgcagtccgggggttgagcccccgcctttcacatcagacttgctgctccgtctacgctccctttacacccagtaaatccggataacgcttgccccctacgtattaccgcggctgctggcacgtagttagccggggcttcttagtcaggtaccgtcattttcttccctgctgatagaagtttacataccgagatacttcttccttcacgcggcgtcgctgcatcagggtttcccccattgtgcaatattccccactgctgcctcccgtaggagtctgggccgtgtctcagtcccaatgtggccgtccaccctctcaggccggctatggatcgtcgctttggtaggccgttaccctgccaactggctaatccaacgcgggtccatctcacaccaccggagtttttcacactgagccatgcggccccgtgcgcttatgcggtattagcagtcatttctgactgttatcccccagtgtgaggcaggttacccacgcgttactcacccgtccgccactaggattataacgacttcaaccgaagtctctgtcaaaataatccccgttcgacttgcatgtgttaagcacgccgccagcgttcatcctgagccaggatcaaactctctgtaaaagtgtgtaagcaattcagcaatgcttgcattggcttaattgcatctcaccgattgagccaaaggctcaagaggttgttccactcaagataactactagctatctctcgttttactgttgttggttcatcgaaccgttctcaaataatgaagttcgattcactaaattcgatcttcgcttccgcttgatctcattaagttccttcgaaccgcactcacactaaattcacacttcgcgtttccgcttgtgttcattaagtgttctgtgtgtaaaagaattttcgagaatcgtatgtgtctcactgtttagttatcaaggttctttgttttctgtctctcagacagctcgtttactttatcacatctttttttgtttgtcaagaacttttttcaagtttcttcaaactttttcgatgttctttcaagcaattcgctctctcgttgacagcttgtttactttaccacatcttcaagcggttgtcaacaagtttttcatttttttatttttccttaaatcaggaaaaataaaagcccgcttcttttttgaagcggactttagtatagcacccatatccttctaagtcaaggactttctttatgttctataaaaaaagttgctaaaattctcacttttcacagcagcttgagcaaacacattccaaatcacctgcgataatagcattttatcctgaacagattcactttttcaggttacattccataaaaaatactcatgaacacatttacaaaaatatcatattcatacagcacattgagaaaagcatccttttcaataagcgcaagagcctcttttcctatagatgtactgcataaaatcgtcattacaagaaaagcgatccacacaaacagtacgcctttaaccgctcctacaagtcctccggccagtttgtttgcacttttcagcacaggcagtccggcaagaagatttaatacccaggtgccaagacgcaggatcaccgaggccagcagataagaaacaaaaaaggacagtccatttacaatcatccttgccagggcttctgaaatgtattccccaaatgaatctactgcaagataggtatatacctccgctgtattatttgattcaagtcctttctgcaaaagttccggtaattccagtccctcaataaagcctgtctgctcttcagctcccggcgatgtcagttcctgttttttctgagattccacaaagctctgacagctttcctgtattttttcatacacaggtgtgttttccataaaaaactcattcacataagggttaatcgcccatgacactgcaagagccagaaatacaaaaaagaaggacacaatttctctgataaagcctctcctgaagcctttataagctgtcagcagaagaattcctgccactacgattcccaaccaggtcaatgccctcatccccctttaactgaatttgatcacattaaccccgctgtcaagcaccagcagataacgattccagccaatcttaataaaattgttaatacttccgtctactgtaccgctgtacttttccacgcctctgctgttcattacacagatctgggaatcattataaagcagaatgtttcctccgcttatttttatagtggtatagggaatattaaaatcctttgtaaaccggaggcttccattaatggaatataccttcatggtatactgcttgtctttatttccgtttttaaacaccatgcctatggtgtcatcatcacagaacgtacttacaatttctttgtccaccttctctgtagcgctttcctttggaatctgccggcctttatatacggtgaatccgtcttcccgaaacgcaacagaccgttctgcatcaaaatatctgatttccggaattacaactccctcatatgtatagccgcttacaattctgtcatcttcattttgtcctacatcgccaaaattataaaaggccacataactggttgtgtcgcttccgtctataaactgatatgtcaccatcataatctcgccgttatccgaaaccgccacatccatgggatatccgggatcttccacatgtgtctggttctctgctatcaggcttccatccgaatcataataattgatccatgtggaatctcctccatccaatatggctgcaacaaggccgttggacgatatcctggccttgacaatgctgtatgaggttgtaacacttcccgcttctccgtctttgtcaaagatcttcatggatgttccgtcaacatctgcgatcactgcccagtcacctctgatatcagccacaggattctgcatttcatacagactgctccagtatgcatccatctcactgtttaccagcgccgctccatccggactgtatctcaggatttttcctgacatcacttcatactttgtggaaacaatatcctcctgttcacttgtctgaatgatatcataagtgcggtaactcctcttttctataaaaagtaccagtcccactgccactgccgctaccaccgctacagtaagaactgtttttttcattgctgcaattttatgcatggaaagctgtcttctatatccttcttcacttccctcatcctgggacagcttcccattctgagccatcattttggctctctttcgtttttttctccatttctgaaatatattggacatactaaaccttgcctttcgggttctctctctgttcttttcactgacatatgagaagtctctccgttactgctcactttgttcacggcaacgcctctgcgctcttctcatatgtcacattatagcaaacttctcagggcaatacaattatttgtccgggataaatggtgtcgctttcagacatgttgttcatacggcatatttcagcaaccgcttccatgcttccatatttttccacactgatctgatacaaagtatcaccgggacgtataatgtatgttgtgcccccggccgatgtttcctccgactgtgtattattttcagtctctgttactttttctgaatccgaatttccggcagtatcccgggactcacggactcttctttctgcctttctcatgtctgattcttctctgtaaattgcccgatcctcctctgacagctcagacttgacattttcgttggaggtttcttcatctgtttcagcagcttccgaaggcacagtttccttctcatcttttttcattttcgctgtatttctggaggcattttcttgtatctcatttttactctcagagcccccttcctgttcccctttggtttcccctgatttttcaccgtcctttacttctttttcacccgtatctgctctctctgttctgaccgatgtgacctccgctttctcctttatctcttccggaaattccgaaggccccgtctcgatcacagatgcagccatttccgcctttacatccgcctgctgcaaagactgataattctgataaaacttcattcctgctgccacaacagccagagcaagacaggctgtagccgcatatgaaaaaacagagatccgttcttccgtttcctccgtctgtttttcctctgcgctcttctttttttgtatgattctccgaaatgcttttactgcctcatccggaacctcttcctgcctgtccgttgttccttccggatttttttccagcatatacgactgcatttgcggattcttttcatagtaaagataatatccgttctgctttacaaggaaactgttttcgtaccgaaaaaacacctcttcccgttccgccggatccatcagcatcagaaccttttcccctccgccaaaatgtttcagatgcacccgtttcaaaagctctgtggcttccagaggtatcgatctctgagaaaagaaccatcccacaatctcctgtccctcaaaatatttttctgtttcttcctgtatttttttccacattttttctgtaaactcaatatgctcagccgaaatatcctctgcttccacatccagagcccctctgataaacatataggtgattcctgaagcccactttgtttccccggtcagaaccgccagacattttttgtcttctccgtttacatctcccgcccctgcttctcttccaagaaaggtgtatacataatcttccatgtaaatccgataatcatcattggcctgtcctatctgacgtatattctttggcacagaaaatatactctcgttgccctttgcctcctgtttctcatctttatagatgacttctatcatgatatatcaccccttcgggtacaagaatagcatataaaaaatgcggattttagcagaatgtaagatgcctgtctcataatttaacgacatattccgcacatgcataatttgttccacagacggatacaataaatcaggacaaacactgcgaggaaaatctatgactttttatattgacgcaaataaaaccggagccgccagagaaatctcttctcttcttaaaaactgtatccttcaccacagaaaaagctggaaggagcttgtatttctgtgtatcggcacagaccgcctcaccggagactgccttggtccctatgtaggccagcagcttctctgcaatgcatccgaaaaagttcatgtatacggaactctttctcatcctgtacacgccctgaaccttaccagcgcaagccaggacatctgcttcagccatccggaagctcttgtgattgcaatcgatgcttctcttggacaaaaaaagcacctgggctacgtaaccatcggagacggcgcgctttacccgggtgctgcggttcagaaagagctgccccctgtaggggacatccatgtaaccggaatcgtaaatacagccggattactggagcagcttactctccagacaacccggctgtctactgtcattcatctggctgacaagatcactcagggaatcctggcaatgatcccgtctgccatacacgaatcatattttatacaaaagctttgatctgtttataaatgccttctccatccagaccgtatttctcaagaagagcaacagccgggccggactcgccgaacacatcattgacaccgatacgcttaaccggaaccggcgctttttcggacagacattcgcagactgcgccgccaagtccgccgatcacagaatgttcctcaactgtgaccacttttccggtttcttttgctgccgcaacgatcagatcctcatcaagaggcttgattgtatggatattgataacctttgcttcgattccatctgcagccagcttttctgctgcttccagtgatgctgcaacacagagaccgtttgcaacgatcgtcagatcttttccctcacggagaacaatacctttaccaagctcaaatttatagtccggtctgtcattgatcaccggaacagccagacggccaaaacgcatatacaccggacccacatgctcataagcagcctttaccatagctcttgcctcaatgtcgtcagacggagaagcaacaaccattcccggaatactcctcatgagggcaaaatcctcgcagcactgatgagttgcgccgtcctcacctacggaaattccgccatgagttgcgccgatctttacattcagtttcggataacctacagagttgcgcacctgctcaaatgcacgtcctgccgcaaacatggcaaaagtgctgacaaaaggaaccttgcctgtagaagcaagtccagctccgatacctaccatgttgcactctgcgataccgcagtcaatatggcgctccggaaattcttttttaaacattgcagtctgggtagcagcagcaaggtcagcatccagaacaacaagatcctcatgttcttttccaagttccaccagagcagagccatagctagctcttgtagcgattttctttacatctgacataatgcttcacctgccttttccaaatcttccattgcctgagcatactcgtcatcgtttggagcttttccatgccatccggcctggttctccatgaaagaaacacctttgcccttcactgttttcataataattgcaaccggcattccctttacagttcttgcctcatcaaaagctgccttcagctgatccatgtcatttccgtcttccacattgatcacatggaaattaaatgcttcaaactttttgtcgatagggtatggagaacatacgtcatctaccttaccgtcgatctgaaggccattattgtcaacaatcacaacaaggttgtccagatttctgtggcctgcaaacatggcagcctcccagacctgaccttcctggatctcgccgtctcccagaagagtgtatactctgtaagaatcattgcttaattttgcagaaagagccatgcccactgccgcagagattccctgtccgagagatccgcttgacatatcaacgcccggaatatgcttcatatccggatgtccctgaagataggaaccaagatgacggagagttttcagatcttccttaggaaaatatcctctctcagccagtacagaatacagtcccggagcggtatgtcctttggaaagaacaaaacggtcgcggtctgctttttttggctccttagggtcaatgttcatttcttcaaaatacagatatgtgaataaatctgctgcagaaagtgatccgcccggatggccggcctttgcagcatggactgctgtaacgatgtctttgcggacttcgtttgcaatcttctgaagctctaatttgttcatgttggtctgtctcctttaatttaataacaccatacacgttacatcatactatatctatcgcctgcattcaacagggaagttcgattcactaaattcatgattcgcttccgcctgcattcattaagtactctatttgtctccaaaaacagctctgtaatcttcctggaattttacgattcccgcatcagtcagaggatgatgaagcatctgctccagaactttgtacggaacagtggcgatatcagctcctgcaagcgcacattctgttacatggacaggatggcgcacactcgcgcagatgatttctgtatcaagacctgcaacctcaaacatctgaacgatctgacggatcagctccagtccgtctgtggaaatatcatccagtcttccaaggaacggagaaacataggttgctccggctcttgctgccagaagcgcctgatttgcagtaaagatcagagttacatttgttttgatgccttcttttgaaagaaccttaacagccttcagtccttcccctgtcatcggaatcttaactaccatattcgggtggatctttgcgatctcccggccttcagcgatcattccttccgcatctgtagtagttgcttttacttctccgctgatcggtccgtctacgatagaggtgatctctttgataacctcattaaaatctcttccctcttttgcgatcagagacgggtttgtggtaacgccacagatgattcccatatcatttgccttgcggatatcctctacatttgctgtgtcaataaaaaatttcattctttttccctcctgagttctgccgtcaattttactgacggatcacgttctttatggcttcattatagcaaaaactcccaaagggtcaagacagcttatttttattaataaattttgtattaataattttaaattttattaataacttctgaggatattaacctcttctgcaaaataactattgcaaaaatctccttttttctgctgtaccgcacaaagcagaaaaataattattaataataatttttaccgggatatttatttttttattctggcatatgctgtggtttttcgggcgatcagcttgggggtatactcaatattatacagactggtaggctgaagccctgtataaaactgatcgttggtagtaattttccggataataatgtcacaggcatctctgcccttcaatgccacaaaatggtctatggtagtcagagacagccttctgattccggaataaaaaatattgtcacagccaatcacagacacatctcttggtacatggatcctggatttttccagagcatcaatagcgccaatagccatcatgtcattctgtcctgcaatggcagtaaaatatttttcctccttcagcagctccatggtcagctggtatcccatggaatattccgagtccatccttggaagagtacgatccatagactcatctgcagccttgatcagtacatgacctttcagcccttctctttcaaactcttttacaaaaccgtctatccttctggaacgctgccactgccgtctggtgagaggcggcgtaataaacgcaacgtcccgatgccccagatccagaagatgccgcgccatcagacggccaaccatagtattatcctgattaatggcgtccacagtggttgttttttctttattgctgataataacaagaggaacctcccttgccatttcctcaacctttttctgaaaatccggatgcggattacaggtatagatgattccctgaggctgtatggtgcggatcatacgcagatatttttcttccagaacagcatctctctgcgtattacagataaaaacaccataccccttctcatttgccacagcctcgatgccctgaagcagaagcacataataaggactggtcaaagtgggacaaaacaccacgatcagcttttcttttttgttgtctcctgtttttctccttcctggaagctcatagcccagctctctggcagcctgttctacccgctccactgtttccgctgaaaaagacacattatttctgcggttcagaatcatggaaaccgttgcctgagaaactcctgctctttccgccacctgagaagaagttattttcttttttcccactgtttttcactctttctctgcaggtatccccggggctccggatcagagttccactcttccctccagagcccgcagaagcgtcacctcatcaatatattccagatcgccgcctaccggaaccccactggcaatccggctgactttaatgcccgtaggcttgatcagcttgctgatatacattgccgtagtttccccttccagacttgaattggtggcaatgatcacttcctttacatccttctggagtctctgcatcagctccttcagacggatatcatccggcccgatgccgagcatgggagaaatcgccccgtgaagcacatggtaaacgccgtcgtactttcctgttttttcgtaagctgccagatctcttgtattttccaccaccatgatcgttgtaggatctctgcgcggattgctgcagataggacaaagctcctggtcagtaagtgtacagcagtttttgcagtaacggactttttccctggctcctgtaatggaagaggtaagctgctccacctgatccttgggcatgttcataatatgaaaggcaagtctctgagcagacttggctccaatgcccggaagatgtgaaagctgctcgatcagcttgttaatatgtgtgctgtaatattccatcagaaaggaagtcctccgcccaggccgccaagacctcctgtaagcttggacattacagcgctggattcttcatccactttgcgcagcgcctcattggtagctgccacaataagatcctccagcatttcaatatcatccgggtccactacttcctcagaaagcgttacttttttgatctcgcgcttgccggaaatggttacttccacggctccgccgcctgctgctgcagtaaactctttttcttccagagtcttctggttttcttccatctggcgctgcattttctgcgcctgcttcattaaattattcatatttcccggcattcccatgcctggaaaacctccgcgttttgccatatttatatcctcctgatttttattacaaaaatatctattacgctttctactatattttattgttcactctgtgtcaatatgtttacggcgcccattccagatcacctctgatgatgacattttgctctgtatgccccgcgccggctattcgccggaaagtccttccggttcctcctcaatgatcacgtccatatggatattttccctgatcgcctgatctaccgtgattcttgaaagattggtctgctgatgatcctccgccaccagcatatgaagctccacactctttcctgtctgccgctcaataatctctttcagctcccggcaggcatcagaatcatccggataatttcttcccagaggagtctgaaactctacatacagaacaggttctcctgtttccccattatactttggtatggatttcaaaagagcctgtttaaaggctgctgtggtctgtcccacgatcaccttccagcctgccacaatcttctgcagatcctccggagcagccttctggggttttttcggttccggtacagcgctctgatttacctctcctgcactgcccgaagcctgctgaacgatcacctgctgcacaggagcctcatccatcctctgctccagaacacggatgcggtccagaacagaatccagattcgtttccattgcagggcggcagagcttgatcagcgcaatctccaccagaactcttttctgcgtggcaaagcgtatctgattggaaagctctgaaaaaatacggatataccgcataagagtgtccacatctgtcatttcactttcttctttcagaagcttcagattctctgaagacacatcaatggcatcctcagggttctccgaagtttttaccagaagaagattacgcatgtaccaggtaaaatctcccacaaactggctcagctcccgcccgcctgtgatcaactcctccagaatatgaatggagcctgttacatcaccggaaagcactttcctgagaagctgactgaacacctcggtatccactgctcccagaacttccagaaccttatcataagttaaagtctgtccaagataaaaagcaatacactggtccagaaggctgagcgcgtctcgcatggagccgtctcccgcctttgccacatagcgcactgctttttcctccgcttctacgccttccgcttccagaagctctgtcagccgggcagcaatggtatcaatagtaatcctgtgaaaatcataccgctgacatctggaaagtatggtaataggaatcttgtgggcttctgttgtggcaagaataaagatcacataggaaggcggttcctcaagagtttttaacagggcgttaaaagcgcctgtggaaagcatgtgaacctcgtcaataatataaaccttataatttccctctgtggggcgataggttacttcctcgcggatctcacggatattatccacaccattgttggaagcagcatcgatctcgattacattcatggatgttccggcctgaatcgccctgcacatctcacactcattacagggacttccgtttaccggattctggcagttaactgcctttgccagaatctttgccactgttgtttttccggttccccttgttccgcaaaacagataggcatgaccgatacggttcgccttgatctggtttgtcagggttgtcacaatatgatcctgcccttttacatcatcaaaattatcgggcctgaatttacggtacagggcagtatagctcataagtcattctcctctcctgatgccccggggcatgaaaaggatgctgcagaatacctcagcgcagtctgcagcaccctttattgttatcctgtatatttactgtgccggtctgtcagtcaccaaaactgattccaatctgtttggcagcctttaccgtctgatccttcggcgaaaccattttcagctttcctgcacattctgccagcggtacgcgcttgatcttgccgtttaccacaccgatcatcactccgtactcctcgtccagaatcgcctctgcagcgccggcgccgatcctcgtggaaagaacacggtcgtaagggcagggctgtccgcctctctgaatatgacccggaacagttacccgcacttcgctgccaatctccttaaaaatctcgtcagcgatctcataggaaactgacggatacttctttgctctggcttccagcttttctttgtatttctttttgggaagcttggcatcttccttagaaatcgcgccttcggcaactgcaagaatcgtaaaacgtttgcctgctttatttcttttctgaatggcctctgttacttttttaatatcatatgggatctccgggatcagaatgatgtccgctccgccggccagtcctgcatgaagagtcagacttccaaccttatgccccatgatctccacaataaacacccgtccatgagaggttgctgttgtgtggatacagtcaatggcattggttgcgatctctaccgcgctctggaatccaaaggtcatgtctgtgccaaaaatatcattatcaatggtctttggaagatgaataatattcagtccctcttctctcagaagatttgctgttttctgggttccgttgcctcccagaattaccagacagtcaaggcacagcttataataagtctgcttcattgcctctaccttgtccaggcccttttcatccgggactctcatcagtttaaaaggctggcgtgaggttcccagaatcgttcctccctgtgtcaggattcctgaaaagtcctttgcggtcagcattcggtatttaccgtagatcagccctttatatccatcatcaaatccataaacttccagatcatccacggcattggacaacgcctttacaacacccctcattgtggcattcaatgcctggcagtctccgccgcttgtcagcaatccaattcttttaatcataatagacacaccccgcttcgtatagtattcaatatctgcctgctgtttctcatgtccgtcagacagtcatataatcagctgctgttcacagtctttctcagaataatgccgtgtgaacagtaacttttcacttctttactattatataatatccgggccccacttgacaagactccaaaaatcgtctatacttaaattccgcgcagccggggagttagcggtgccctgtacctgcaatccgctacagcaggggtgatgccaatctgaggcttgtattttgcagagctgccctttataagcggcgctgacgtctgggtctcacgcaacaggaatccgtgaaccgtgtcagggcaggaatgcagcagcactaagcggacgctcttgtgtgccgtgagggtgcctgggccgagctggctgtaaaggtaacgtctgtgagtacatttcgaggtgcggcgcgcgtaaaaaaatgaatattttaaggagttccatgcagattgcaggaactcctttttttgtgtttgccagtttcccatttaccggcagatgtctgccaccactttattgatcagctttccgtcagcctttcctttcagatcacccatcacagccttcatgatctggcctttgttttttgttgcaagaacttctgcaaatttatcctccagatacccgcggatttcttcctcgctcatctgctgaggcgcatattttgcaatgacgtcatatcttgcctgatattctgatctgaggtcttctctgttctccggacaggtatccagctgctcttttactgttttcagttccttaaggattacgcggtctaccagttcttccggaatatcatcccggcatccctcgtcgattgccaccttttttgccgccgcaatcagggaagaaaccgcttcttttgtcaccttatcttttgctttcatagctgctaccatgtcttttcttaaagtttctaactgcattgcaaattcctccttaaatcttattgttatagttttcccggatttctccgttgtcttacgatagaacaatactcattccgtatatctttttcctctgcctttataaaaaaccgcttcagcttttttcttcttttttcattttcttctcctgacgcagctcccggaaaaattcagaaagcatggaagaacactcctcctgaagaattccttttgtaattttcaccttatggttaaagccctccgcttccagaaggttcagaaccgacccggcgcaccctgccttcggattcatactgccgatcacaacctcatcaattcttgactggaccagagctcccgcacacatctggcagggttccagcgttacatacatggtgcatccctcaagtctccagtccccaagctttttgcttgcttttctgatagcattcagctccgcatgggaaagagtatttttatctgtatttctccggttgtaccctctggcaatgatctttccctctgacacgatcacgcatccgatgggaacctccttcaaagcccgggctttttttgcctgccggatagcttctttcataaaccgttcttcttctgtcacttaagccgctcctctcctgattaacgatatatcaaaatacattacagaacaattctgcgagaacaatagcctctctctttttctgaatttattatagtaaatggtcattgcaaaatcaatgcgaaaaatctaaaataaaatcacatgatatatctcaggatcggaggttctttatgaaaatatacggtttaaacaaaacaactcttcttgactatcccggacgggtggctgccacaatttttctgggcgggtgcaatttccgctgtccgttctgccagaacagcagcctggtgctgaatccctcctcacagccggagctctctgtcacagaagttttatcctttttaaaaaaacgtcagggaatcctggaaggcgtgtgcgtcaccggaggtgaacctaccctttcccctgatctgcctgaatttctggcagagatccgcgctcttggatatcctgtaaagctggataccaacggtacccgtcctgatcttctgaaagagcttgccggggaagggctgattcagatggctgccgtagatattaaggcctgtcctgataattatccttcactttgcggactccttcaccctgatcttgatgccattaaagaaactgttgattttctcataaacggaaccctggactacgaatttcgtacaaccgtggtaaaagagcttcattccgaacaggattttgtcgctatcggaaaatggctttccggagcaaaagcctattatctccaggcatacagagactccgaagaagttctgcagcctggattcagcagcttctcttataaggagctggaacatttccgccagattctgatgcagaccattcctttagtagaacttcgggggattgattaaacggtaccagtatccgcccctgcttttaggaagctggatctgtctgctttctttaaaatacgggaaaccaaacatatttgccataaatcgttcctgctggtcatagcctccgggcactcccagtatgtaatgtccggaactgttttttcctatcagcaaatgaccgaaattataaaatccgtactgcagaaagcgattattccgaagcgcacagtctctgggatgaaaatgacagagatctgccggctgtattttgcggcagtggcagatctctccatcaccaaaagcattgaacggctctccgaaagaaagcgatttctcttttgctttggtcatttcctgattgcaaacagctactgattgagatgtcagatactctgtatgaatgtcatccccatctgccgttatcgtcttctgttttaaattattttctgatggatcaggatttttttcactcgttttatccttctgcgcctcctcctgtacttcttctgcagtttttattcccatattctgagatatctgacaggcatcgtcttcctgcggctgactttccactgattccacaccggctctgatgcccgaatttcccattttcttataaacgttattctcttcctctgtttttactgtattttttgtttccaaattccggtggatctctgagacatcgttttcttctgattgatttttctgttttctttccgtaattttattttctgaatctttcttcagctcagcatttatctcttcctgccggttactctgtattttttcttccgatgcagtttccggatcatgcatttccctgcaattatgatcatctttcattaaggggttctgcatttcttcctcagattttgtttccccaaaaacatgctcctcttctgatttcacttcttcagcggactcttctgatgattctctgttcatggtactgttttgcggatcaatttctttatctgagcttttattctctgttttttcttcctttactctgcggaaattctccggacgaataggtttatcatcccattctgtcccaaaaaacgccccgttttccgtaagaaggatcattccccccatattctccagggtcatggcgcttccgcccatatgattccgttcagtctccaaaacgcagtcagctctgctgtcttctgtcatgcaggatcccagcagcactccatccagcagccctgtcttacgggtgaatccgaagatttcgcactttacatcaggagtaaggcccggacaaagaatatgcgcctccattctgcatacctgttcctttgcctccacccggataaacccgcagttccttcctttttttcctttttggtattcatatacatatgcaacaaaacgccgatatccactcaaaggatttcctcctggcctctcatttcattaatgtatatgtattttatacaaaaaaagaccctgccccttaacttcatccagttctgcgccatctggaaatttatctgccaatgtgcatgacatttccattgttttttcagctataatggtcttacttggtttcatcggcacaaaaacacgctgaagacattgcctttttccgggtcatattcccctttcatatagccccgctggcctcttatgatctcacgggcaagatacaggccaagacctactccctcctgatcttccgcgttctttccacggtaaaatctctgaaatactctggcaaattcttcccgcttcaccttggttccgcggctgcatacattgatccgaatatacatctcatattccagaagctccacaagaatcacgcttcccggatcactgtatttcacagcattgtccagaagattaaaaaacacctcctccgtccatctgcgatccagacaggctttcagcttctgatctcccttaagccggatatcatttccgtgctgctccgcctttaacgctgcctgatccacggcctccaggatcaccggaagcaccggctgaatctccggcttcagggaaataatccctgtttccatacgggagattttggcaaagccttctcccagccagctcagtttccgggcctgacgatccagattatctgcaaaatgccggtattcctccgttgtcagagaatcttctcttaaaaattcgctgtacattttaatatttgcaatgggcgtattgatctgatgcaccaggtcgctgaccgagctgctgatctgatccctgagcagcttttctctttcctcctgcgctctgtggatctcataaagacgccctgcctgggactgaaatttgccaggcagggtatcttcattctcggaaaaatattttacttcccgtcccagtatcagctgctccagcatatcatccatctgagccattgttttatctgccatcttttccatttttttgtatttatataccagaaaaacaagggctgccgtcagaagacagatgataataaaaagcatcgcagtcactgtgtctctcatatccggtcactccatttgtatccaatgccaaaaactgtcctgatgtgatccggttcctgaggattgtcctctatttttccccttagtctccgcacgtttacattcagtgttttttcatccacataattctcataggtatcccacaccatagccagcagctgttctcttgtgagcacctgattccggtgagccagaaaggcttccagaagacggatttccgtggcagtcagttttacctcctgcccgtcctttctcagctgttttccatcaaagtcataggccagcgcaccggaataataaaatctgctgtctgtattttccgctcgtttcagaagcacttcaatcctccgaagcagcacagccatagaaaacggctttgtcacgtagtcgtcgcaccctgcgtcaaatccctgcagcatatccgcctctgtattccgggcggtcagaagcaataccggaaccgtattactctgccggatgtgtttcaaaaacattctcccgtccccatccggcaggttgatgtccagaattaccagacttaccggctgattcatatagcctgacgcttcctcaatattttttgcgctgtataccagatattccttttttcggagagcataggcaatgccctcattcagcatggtatcgtcctctaccagcaaaatttttgtatccattgttttctcctgtccaaagagcacagccagctccccgttttccgcacattctacacaatactgtgtttatcttactcaatttccctcaatctttcaacaatagattttttgttcagtacctttaccaaaagccaggtcataaaaatgcagataataataaccagaagcataagaacagcagccgatgtcaggaacaatcccggattaaatcccgtaaacagggcatgctgcgttacaagataggacataatgctgccggacaggagcataagaaccacagatactctcataaatttcagtgtatctttcagaagcattgcccacagctgcctctttgtcatgccaatggactgcattgcagccagctctatctttctggaaaacacatccgaagtgatcgtattgaccagattggaaactcctatgatccccagaagtcctgccagcagaaaaccgatcagctggaacgtctgtttctgagtttccatctgcactctggtcatatatcgggactccatcttcagctgagaattgtattccgcagccataagactgttgatctgctgattctgttcctctgtaatttcttcctctgtatcaatctgaatatcgctgatccactggtcataatccgggtacagctttttaaacaaagtgtcggacaaaataatatttccaacactaatatcactggttccgaacatactacgcttttcgcacactgccagaactgtcatttctttttcagaataatttccctgattatcataaaatccaatgattgctgcatctcctgggtgtacgctgtccttaaaatctcttcccatgacttcctgactgtccggagctaaccatataacgccttctcctgcagcaaatttatctacatccacagttccctcaaaagcacccgcacatgcaagttcctgctggatcagctctgcaggaatcccttgtacactcagcccccagcgattattctttgcctgttcctgaagccccgtatctccataggtactcataaatttatcactgtttgcaaaaaattccatttcattttttaacggaccgtccagagatacctctgcctgagacggcagataaagtctgcccactgttgtttccacataatccggcatcattcttgcctgatacactacattcacatccgtcacaaaaggaaggtctgcaattttatccggcaattctgcagaaacaggcttatagggctcctccaggctccagcctgatccctcatgaataatccgcgcatcattcatattatagcgctccaccatatgatctacggaaaatcccagagccgcattacaggaaaccagaaagatcattccgcttaacgcaaaggaaagaatggtaaacagatttttcttctttttgggggcaaatctggccgcctctaccggagagatgcggcaggccagcttcagagacttcaatgcgctgatatatacggtaaaccaggaaaatccagctcccagaataaagatcaccagaacattaggcgctttataaaacatggcatacatggtctgcgccattactcccgggccgatcagatttcccacaatatagccaagaacgattccgatcagaatgccaattactgccagacggcggatctgctgcatcagcacagtcttcagctgccttgctgtagttccaatggttttcatcatgccaaaccagcggatatcagaggatacagaaatataaaatacattgtagatcaggaaataaccgcttaaaataataaataacacaaacagcactgccggtcctacacttaacagcatattgctcatactgttagtattctttgttccgattccggttccccctgccagatcgcaggcttcctgcagcttatccataacatctgttttcagaagaagaggattcaggttgttcagcttcacataaatcttctgagggattttttccattgcaggattatactgaccgataaattcaggtgctgtataaatctcatcataaatctcactgatattgatcagaggatttttatagtatccggtaacagtaaatgttattggcgtttccgccatttcctcatctgtgccgagcatcaccagaagctccagctgactgcccacaatcctttcaagccccagatgttctgccatagtatcagaaatcacgatttcatctgcattctgtgcaaatctgccttcagtcagctctacaaaattatgttcaaaatatgactcatccggcgccagaagccgcacgtccattcccgaaaactcctgattgtgaagtccggctctgctgcattcccttgccatgtccgcccactggatctgcggcagctccttaagcttatcccgggtttcctccgtgccgttgatattgccttcacagcccggaccgggagcagattccccataattactgatggtagaaatcatactgatccccactgtccacactgctgtgatcagaagagtagtcagagcaatagccagaatggcaatacggtttctgcttttatgagaggtgtaattatcctttgccagctcctttaatacttccttattagtattctgaaacatggatgtcacctcccactacccttccgtcctccagatggatgatacggtctgcctgctgggcaatttcctcattatgggtgatcataataattgtctggttaaactccctgttggtcatctgcagaagtcctatcacctccgcgctggttctgaaatcaagatttcctgtaggctcgtctgccagaacgatctttggcttggaagccagagcccttgcaatagccactctctgctgctggccgccggaaagctgattgggacggttcctggatttttccgtcagtcctaaaaggctcagtatttttccgataaactcatcatcaggtttatttccgtccagccgtattggaagaaccacatttttatacacattcagcatagataccagattataattctgaaaaataaatccaatatttcttctgcggaatacggtacgctcctcgtccttcatattcagcagagactgtccgccgataattacctctccgctgtctgcatagtccagaccgcccagcagatttaaaagtgatgtctttccagagccgctggtacctacaatcgcaacaaactcgcccttttctactgaaatgctgatatcgtccacggcttttaccaggctgtcgccctgaccgtaatattttttcagatgctttgtctctaatattttcataaaaatgtctcccttcgttatgttgagtctatcataacaaaaggagattacaatccggtaacaatatgaaattttccctgctgttgtttcattcaccaaatcaatgatacataaattttacacataagtgcagaagaagctccttcctctcatttttaatgtaacacgaacatactttcttacgatatattaacaaataaaacaaaaaggaaccctttaattaaaggattcctcacattccagtcgaagcgacaggatttgaacctgcggcctctgcgtcccgaacgcagcgctctaccaaactgagccacgcttcgatttctttatttatcagccacatctcgcgactgcaaaaattattatattcattttcatagcatttgtcaacactttttttaaaaaatttcaaaaaacacgaaaaaacttttttgaagatttcagagagtacgtttttccttcttaaatatataaaaacgctgtcaaatacagggaaatccattgaaatcccacaatttttaggctatattaaagtcacaataccaaaaggggatttttttatgaatgtaaaagacatcagcacacactgtacacggacagaatttgtcggaaccacagttcttgatactattggacttgtgatctccggcattgacgatacacttcttcaaaaaatgaacatcggtaccaaataccatgctctcgggcttttcagctcccggacaggcgctgccggacagctcaccgccattgatgatgcggtaaaagccaccaacacagaaattctttccattgaactgcccagagataccaaaggctggggcggccacggaaactatattgtactgggaggaaatgatatttctgatgtacgtcacgcagtccagcttgctctggagcttaccgaaaaatatgcaggggagctttatatcagtgaatccggtcacctggaatttgcctattctgcaagcgcaggtcctgctcttcagaaagcctttcatgcggaacccggggaagcctttggttttatggcaggctctcctgccgccatcggccttgttatggcagacactgccatgaaagcgtcctctgtaaaaattacaagctatatgacgcctgatatgggaaccgctcactccaatgaggttatcctttccctttccggcgatgcaagcgctgtaaaggaggctgtccttaatgcccggcagattggtctggagcttctgatcgccatgggaagctatccggaaatccccggtaccccttatctgtaaaccaaattcccggaagcagcagcttcaactgcagcttccgcagatattcaaaaacccggcttccaaaacatacagggagccgggttctgctttattctgtttttatcatacgataacctacgccgatatgtgtctggatatattgaggtgaatccgggcccttttctattttctttcgaagcgtcgccataaatacacggagagaggcaacgtcattttcccagttgctcccccagatattctgggtaatgaaagtgtgtgtcagaaccttcccgacatttctggaaaggaggcagagaagcttgtattcaataggggtcaggtgaagttcctcctcatccagatatgcgcagccggcagcatagtcaatgcgcagagcgccgtttacaaaaacagacgcttctgcaggtgagtcatttttgatcatggccagacgtctctgtacgacacgaagtcttgccagaagctcttctacagaaaatggtttggtcagataatcgtcggctcctgcatccagagcgtcaattttgtccgtatcctcactgcgggcgctgataacaataatcggcatggtggaccaggaacggattctgcggatcacttccactccgtcaatatcaggcagaccgagatccagaagaacaatatccggattgtgggaggaggcttcaagaatggcagtttctccgtttccggctaccagataacgatagtcgtgtgttttcagtgtggttgtgatcagattttttacagaagaatcatcttccactactaatatcaacggtttattcatgtaattgtacctcctcagctggtaatgtaaaagtaaatacggttccatggggaacattatcagaaacactgatagaccctccatgtgcatttataatggacttacacagagaaagtccaagtccgagactcctccggctgtctgccacccggttcgagcctgtgtagaacatatcaaatatctgctttttattttcatcagaaatacccggaccatcatcggatacagaaataacagcccagttatctttccggaaagtagaaatccggatctccgatccccggggagtatatttaattgcattatccaccagatttataataacctgaacaatcagctttgcatccatttttgccagaagcagatcatcctgatgctttaccgtaatatgatgttccacagaaagtctgtttacgtggcggagggcttctgtaaccacctcgtctgccagttctgtggaaatacgcagattcagccttccctcttccagacgggtaacagacagaaggttttccacaaggttgatcagccacatggagtcatcataaatatcctgatacagagttttttttgtgctttcgtcaaacaaactgctgtttgacagaagattgctggcgtttcctgaaatagaagtcagcggagtacgaaggtcatgagaaattgtgcgaagaagattcgctctcagctgttcgttttttgccaggatggccgcctcttctttctcatgggcatttttctcattttccatggcaagagcacattctcccagaatagaaagaagaatattgttttcggaggcatccagaggctgttttccggctgcaatccccaccactccgtaaacagaatcatttacccggatagccagataaagacatttggcattggaaagcgtctgggtggtagcgcctgcgtgacggttgtttttaaacacccattcagccactgcgctttcatttcttgtgagataatcagaggcggtatcttcttcaccggcagaaaatgccatgggagccgccagggtatttttttccgcaggatagatcactatatctctgttcagaagttttgtaagctgatgagccgtagaagtcagaatcgcgtcacggtctgtagcctgctgaagtatctgactggtatcaaacaaaatctttgtacgaaaggccgtacgggcagactgactggcaatcgtcttcatccgtgtggtaagtgttccggtcagaaaggctgaaataaacattaccacaaaagtaacaggatagccccggtcatatgccataagcgtgaatttaggatctgtaaacaaaaagttaaacacaagcacactgacaattgaagtgatcaggctgtaaacccggtttactgttacaatggaagttaccagcaccgcaagcacatataccgtaataatatttgcctcgtcaaagccaagctgctgaaaaaggtagcccaggcagctggctgctgacaggataaaaatactttttaaaatgtcagatgcggaaaagataatatgatttttctgattgtgaacagtcggagtgcggttcggagtctgatccggaataatatgcacatccatatttggagcattggtaataagctgttctgtaagagaaggttttcccaacagacgctttcctgtgactgtacttcttccgatcacaatcttggaaaccccggacagctttgcaaattctgcaatctgaagagggacatcgtctccgtaaacagtttctatggtagcgccaagctgctgggcaagataaatattggaacggagccgctgtctgtcttcttcagtcatggcagaaaactgtgaggtttctacaaacagagcggtaaaagttccccggaaagcatttgccattctggctgcagtccggataatctttgcattggacggagaagaagaaagacagaccagtatgtgttcatccgtataataatcgcttttgtttctgatacgggcagcctcagttcttttatttacccggtccgcacaccttctgagcgcaagctctctcagcgcagtcagcttttctaaagtaagggcagaactgtcagcttcagaggaatctgaactgctttcagaggcaagctgttcaagaagctcctgcggttcaatatcaacaagctttacctgagcagcattgtcaaaaacagaatccggaatgcgttcaaggattctgtttccggtaattgctgtcaccatatcgttaaggctctcaatattttctacattggcagtagtataaacatcaatgcctgcttttaaaagctcatagatatcctgataccgcttatgatgccggcagccgtctgcatttgtgtgggcaagttcgtctataagaataagtccgggctttatttttatggctttatcaaggtcaaactcttccacaggagttccattatgtttggaatggagaggcggaagcagtttcagaccgttcagccgggcccgggtctgaggatgagcattggacttaatgtaacctaccgcaacatctgtaccatgctttttttccatatgggcagcatccagcattgcatatgtctttcccacgcctgccgcatagctgaaaaaaatcttcagatgccccctttccggagaggacatctgatcggatgctgctgccatatctgcactctgattttgtttttccacactatcactcctcgttatttcatacaggcattataacctatctgacaaaatcctgcacaaaaatatgttggacacaattatttttattatcataaacattgtgaacagtaactatttttccaggtatgcagccttcagcaaccggataaataattctgcttcctgggaacggctgccttttttccacaaagcattcacaagaaatttctgtgagttaagaggcataacaggaagtcccaacggctcacatgcaagaatgttttcatccatcagaaaaagaaaagaacccagcttttgatccggctctgtgtttacatccgcccggataaatccaaaatcaatttttcctgtattcagctgcttctgaatatcctttgcagaaccgtagaaaagactcagctcacagccgggagcctgacgggaaaacctttccagaagatcatttaaaagagagacttcttctgtatgttcaaatgcaatggaaagcattgagggcctgtcggaactgattacagtccggctgctgtcgccaaagaaaatatccagttttttcagtattagaaagcacagggcaaaaacagcagctactgcgcagatcagaatcagttctttcataaaatcatcccttcatgttgcgtatttacggaagctttattccaatcagatgtggaaacacttctgaatatctctgatgttcccaagaacaagcatggtattattttccggaacaggagtatctgatttaatattcagattcatgactccctgatgtttaaatgccatgatattaatgttgtgcttgtttcggatgtcaagctgcccaacagttcttcccacccagttttccggaacagaaatttcaaaaatagcatgttcgtcatcaagctccacatagtccagaatatggtctgcactgtagcggatcgctgcccattcagccatttgcttttccggataaataacttcatcagcgccgtttttcaggaggaatttggcgtgaacatctctggcagctctggaaacaacatattttgcacccagctcactgagcagggaagtggcttccagagaactctgaaaattatctccaatggccacaatacatacatcgaaattccttactccaagagattccataaatccttcctttgtggcatcaccaatctgtgcgtttgtaacataaggaagaatggcatctactctttcttcatttctgtcaatagccattacctgatgattaagctcatccagtttcattgcaatatggcgtccgaatcttccaagtcctatcagtaaaattgatttcatcatagtaattgtctccttttattaacctactgtaattttttcctgcggatatctggaaccgtaggaatttctttctgaaagcgctgcaaaaataagtgtcaggccgccaaccctgccaaaaaacataagcaggatcaggatcagtcttgaaaccattccaagggttggtgtcagtccaagggacagaccaaccgtaccaatggcagagcttgtttcaaacaaagcggagatcagcggaaccttgtcaatgtaactgattatcatgcctccgccaagaaacagaaccagatacatcagcagaatagtcgcagcatttttgatcacactgtccggaacacgtctgcggaaaaaatgagcagaatcgtttttgcggaatacggacaaagcggaagaaaacagaactgcgatggtagttgtcttcataccgccggctgtggaacccggagagccaccgatcagcatcaggatgatcataagcatcagtccggtttctgtaagcagggtcagatctgcagtgttaaatcccgctgttcttggcgttacagactggaacagggaggtccagatcctttctcccagaggcagaccggaaaattcacagaaaaagaagtaaacagccggaactgcgatcaagacagcagtaaccgtcagaataactttactctgcatattatattttttaaactgcagtttatttttcttaatatctgcccaggtaacaaagcccacgccacctgttacgatcaaagccatgatcgtaatgtttacaagaggatttgaagcataggaggtcagagaggaaaaaggttctctgacaccaagcagatcaaacccggcgttgcagaaagcagatacagcgtggaacagagaataccacagacctttcagaataccgaaatctttgcagaatacaggcatcagaaacactgctccgatcagctctataaatatactggttttcagaataaatttggtcaaacgtacgataccgccaacctggtgggcagaaattgcttcctgcatggtgcttcgctgcatcagaccgatttttcggccggacgcaacagcaatggcaacagcaattgtcacaacacccatgccgccgatctggatcagcgtcagaatgatcgcctgaccaaattcagaccagtaggttgcagtatcatggataataagtcctgttacacaaactgcagatgtggcagtaaaaaggctgtctgcaaaggatgcgccatttccgtcccgggtggaaagcgggagcatcagaagcaggctgccaagaagtattacagaaaaaaatcccagaatgattacctgaaaagaagtaaaatgtcgatgttttcggtttcctgtatgattcattgcggcgattgcctccctttatctcgtctttatggtgtctttatcatatcttaattcgtattaagtatgtataaataagaatttgatgatgttaagattgtataaagacgaaaggagttatcctaaaaacagtgtaaccaggacaatgagaagagatacaaccgccagactaaaaacaggaaggccgataaacatagccaggacagctgcatgtggatgacgaaaagcaaaacgttctgcacggttgtcaaatttatcctctaatttgtgtatggatcttaaaatattggacataatcatttctccattctccttattttatggtaaagctctgttgtcaggctttcctctgttcttaaattatggtaacacggaaaaaattaagatggaaaaaacgcatgatcctgtgagataaaagttacataaagaaggagggccgggctgtatggcccggcgagtatgaaaaagaaaaatttaatttatgtaaaaaagcattcgctttatttactaaatactataaatggaatttgtgatgaaaatgtgaggataaattgaaaaaaaggtgatgtaattctaaaaaacctgtaaaatcacaggtgccggaaccgggattccggaatatattccagaattctgagacatacagaacaaaatgtcctcatggaagatgatctggaatgcattttgacctagatactgtgaacggagtaaaaaagggcataatttttacggagcctgacctgatgaaaaaaaatattgtaaaatacagccgccttctatataataggaaaagaaaaaacaggaaaagcaaacgagcgctttgctcatagacaactctcaggaggaaaataatgaaaagagaaacagttgttgtacttgatttcggcggtcagtataatcagttgattgcccgccgtgtaagggaatgcaatgtatattgtgaaatctattcctacaagacagatattgaaaaaataaaagaaatccagcctaagggaattatttttacaggcggaccaaacagtgtatatctggaagattcacctgcgtatacagaagaaatttacaaactcggaatcccgatcctgggaatctgctacggctctcagcttatgatgcaccagcttggcggaaaggtagaaaaagcccctgtgcgcgaatacggaaaaattgaggttcatgtaaacactgactctgccctgttccagggagtttctccaaaaacaatctgttggatgagtcataacgactacatttccaaagaagctcccggctttgaaatttctgcccggacaaatgactgccctgtagctgcagtggaaaataaagaaaagaagctttatgcagttcagttccatccggaggtgcttcatactcaggaaggaaccaaaatgctgtcaaactttgtatatcaggtatgcggatgtgccggagactggaaaatggattcttttgtagaagattccattaaagcggtccgtgaaaaggtcggaaacggaaaggttctctgcgccctttcaggcggagtggattcttctgttgcagcagtccttctttcaaaagcggtaggaagccagcttacctgcgtattcgtggatcacggtcttctccgcaaaaatgaaggcgatgaggtggaagctgtctttggcccggaaggttcctatgatctgaattttattcgtgtaaatgctcaggaacgtttttatgaaaaactgaagggcgttgaggagccggagcgtaaacgtaaaatcatcggcgaagaatttatccgtgtatttgaggaggaagcaaaaaaaatcggcgccgtggatttccttgtacagggaaccatttacccggatgttgttgaaagcggcgtagggggcgagtccactgttatcaaatcacaccacaatgtgggaggacttcctgactatgttgattttaaagaaatcattgagcctctgagaaatctgtttaaagatgaagtgcgtaaagcgggactggagcttggcattccggagtatcttgtattccgccagccgttcccgggcccgggactgggcatccgtattatcggagaggtaactgctgaaaaagtaaaaatggttcaggaggctgatgcgatctggcgtgaagagattgcaaacgcaggctgggataaaaaggtaaatcagtacttcgcagcactgacaaatatgagatctgtcggagttatgggagacgaaagaacctacgattatgccattgcccttcgcgcagtaaccactacagattttatgactgcggaaagcgctgagcttccgtgggaaattatcggaaaagctaccagcaggatcgttaatgaagtaaaacatgtaaaccgtgttctttatgactgcaccggaaaacctccggcaacaattgaaatggaataaagaaatgtaataaatttataaaagctgagacagaaaactgactcagcttttatttattcaggttgctttagaattccggctcaataagaccgtaagtgtttcctttacgtttgtaaacaacatttacctgatctgtctctgcattaacaaatacaaagaagttatgtcccagaagttccatctgaacacatgcatcctcaggatacattggcttgatatcaaacttcttggtacggatgatttttacttcttcatcctcctcataatctttttccagatactcctgctggaaattgccaggtgcctgcttcctgtctacaattttatttttgtattttcgcagctgacgctcaattacttcttccaccaggtcaatagatacatacatatcattgcttacctgctcggagcgtataatatttcccttcactgggattgtaacctcgatcttctgtctttctttttcaacacttaaagttactacaacttcggtgtcaggagtgaaatacctttccagctttccaagcttgtcttcaacggctgttctaagcccttcagaaactgtgatgttttttccgctaataataaatttcatacatccatcccctttgctgtttatttgggtaatgtccacgcaggtaaaaatctgcgtctattacttatgggttcattataccacatacttatgaattttaacaacactttacgaaatttttatattaataattgataaatttcgctattaactgataaaagcagatactcataggctctgtttcttactgcaccccggaaacacacatctgaagacttctgttttcagaaggatcttccagaagttctgttcctttcttgtctgttacacagtaaagaccttttccgcttccttttggcgcatcactggaaatttccagacgataggtttttcccggctctacagagattttttctttcaggaaaggataaagagctgtattctctttcattccataggtatccccatttttttcataaatcacctttcctgtatctttttctttcagcaccacattcaggctgttgatctcactgttgcccggctctgtgtatatacggatcttaattccggaaagtgtataaccgtctgctgtaaattcctgtatcaccggaacattttcttccagcataactacattctctgcttccatattctgcctgctgttgtcaaagaaatttatttttccctgaaggacacctgccgcacatacagtcattggaagtacaaatgcagccactccaaacagaaaggctgcccttatctgccacaccatcccgccggcaatgacatttccttttctgctgtgatatctgggatgtccgaatactacataaatcagcaataccacccacatggcagtacagagaagctcctggtcatggaacccgtaaagatcccacatacgtacggaaaactcacggtcttttagaatatatttgagaataccgctgttcagcactctctcatcaaccatactctggctgcagaaaatatacatagcaagcataaaaatatttgttaccatataaagaagatttccgttaccattcatcataaagttcaggacaaggaatggcgccattaaaaggatccactggggattccatgtagaaaatccaaagattgcaaagcttactgccacacagaaaaatacggaccatgaccgaagctcatcctgcgtctctgcttttttctgataagcccacaccagcacaaaggctgctgccgctgcaagaagattgatcccgctgaaaaatcccagagaaaaaggcttctgtacatattccagcgctccaaaaccaaatacatttcttctaaacgcttcagatcctatatttggaagaatctctgcaagcaaaggagcaagcataacagcagtatatttaatcagatttctgatcttcttttccttcagaagcagaagtaccaggaaataaagcactgcatgatatttaaaggttgcagcaaatccgcacataagggcaaactgccacattttcccccgaaggaaaaaataaaatcccagtaccagaaagagcacagtaaatatgtcatactggctgaaaataaactggctgaacacacccatcggaaatacaagaaacgcaaacttacacaaaagagactttttctcgccaaatcccatttcttttccgattttgtaaataatctgagcagtaacaaaatataagataaccggaagaagcttataccacataatattaataaaactgtttgtcagcattgcttccggtgcgtgtcctgtaagataaaggggcagattccagaccgcataggcaataaacgtacttggcagataatttgcccagtatcctcctgactgctcatagcttgcctgataaaaatccgcgaaatgttcatacatcagaaaggaacggtttcctgtaagctttacatcagaatgagcgcaggtcacaaaaagaactgccagtatcaggaaagacaaaatccagtccagtctgcagagatcgtttccgctccacagcttcatactgttccaccggtctttttttctgcccatccagcctgatgcatatgctgcttttttcttattcatgaatactctcctgtttttccctgtcactctcttttccaaaaacatctttagcctggataaatccattacggtttctctgtacttccccactgaatttctcaggttctttcacagaagcatctgcgctgtatctgatactgtccacctgcattgtctcactgttttcagactctttttctgttaaatcttttttccggaactctgcctctctgttttcctgggtttcagattctctgttctgttgacattttttgtcctcatcctcaaaattcagacgctcttcttccactaccagaggtctgtccagtacccttgtattaatactcagtacatattctccaagaaatccgataaagaacagctgaagagctcccagaaagaacataccgatgaccataggagcaatgcctgccgaaaaacgatcccagtacatcagcttcagaatcagatatacaatacctgccgcaaagctcagaccgccaataataaaaccggcaaaagttgccagacgcatcactactttagaatatgaggtaataccaatcatggcataatcataaaggctgtaaaaattatttttgctttttcctgctcttcttttaggctgaatatagggaattgctttataatcaaacccaagctctgcaatgattccacgaagatagggcatgggatcatgaaggtctcgcaccacgtctacaaattttttgtcatacagtccaaaaccggtaaactgttcaatatggtcgatctcggtgatctttctgatcatcttgtaatacagaccacggatcctgtacattccctttcgttcctgactggcatttttcacaccgatcacgattttatttccctgttcccattctctgacaaatttcgggatcatctctaccgggtcctgaaaatcagcgcacatacgaaccacacagtctccatatgcctgtttcataccgtaaacaggagatctggcctgaccgaagttttttgcattaaaaatagccttaatgtttttattattggcacacagtccgcggatcagcgcctgcgtattgtctttggaatgattgtcaataaacaaaatctcatagtcataatcactgaggtcgcgctccattacttctgtaactgcttttgacagtggaaccacgtttgcctcttcattatatgtaggaattaccactgaaattttctttttcattttttatctcctgtactctggcttttcagccaggcaatggtttctctgattccctgctcaaacgtatactccggtacaaaacctgtatcctgataaagagaatcaatatctgcgcaaaggttcattacagcgcctttgggatatggtctggctccgatccccggattcctgtaatctgtaagctctgccattttctgtatataatcccgaagcagcgcaggctgtccgcttcctacgcagtacacggctccgtcccgtcctttttctccaataagataaaaggcgcggcctgcgtctgcgctgaaaagatattcccatctctgcattccgggtgtaaattctgtaggctcccctgccagcattttgctgaggccggaggcgatcatggtagtttctttttcataaattccataaacactgaatattctgggccagatacactctattcccagttccttgcaaagcatccttgccagatatccggatgccagctttgccgctccgtaaggagttgtgggatttgccgcgctttctggtgaaatcctgtccagatccagcagaccgtactctgcctgggatccggctccgataaaacgtttacagccaagagctgccgctgcctttactgctgctaaagtatacccgatgttccggctttgaagctctgtgcttgaatttctgttttctccggtattcccccaggcaatatgataaaacgtatcacattcctgcgaaatcatttccggcagcctgtccagatgctccagagaacagtccgcaaatttgatcagactgctttccggcaaacgggaacgcttttttgacccttcccgtacaactgcataaacctctgttccatgctttatgcattcttctattaaagccacgccgatcatactggtggctcctgttacaataatccgctgcataattttccttcttatttaacttttgtactgtctttagaatatatgaaatcagaaaaactcttctgtttttctattgtttctgctgtctggcagaatatttttgtctgatttaaagagcataaaaatactctggcgtattgtctcattcattttcagtgtaatgacgcaaagtgaattttccgtctgtaaggcgaaggaataaggcgatgcggcagcatcggcgattgacgacagcccggcagctggaaattcagacaattattatgcgaatgtgaatgagacattatactacttctgctacggaagaggaatgtacatattttcttccagctcctccctggaaagaaacggatacatgtcctcaagaggcgcagacaccatttttccatccggaagctttttcgatgaggttttcggctcggttttctgatacctggttacaaaaacctcacatacagccgctccatccatttccaatacttccttaatcgtatccgccagtttttctgagctgtgaatacatctgtacggaaatccataagccggaataagcttctgaagatccggaaagctcaggtcgccgctctcctgtccaactcccaccagaggctctccaaaatagctctgctgagtctgtcgaatggaatgatatccctgattgttgattacaaaaagttttatcggaagatgattctgcctgatcgtctgcagttcctgaatattcatctgaaggcttccttctccggttacacagactaccggctgtttcccggatgcaatacacacccctgttgcccccggaaggcagaatcccatagacgctgtattgggatttgtaataaagcgctgacctttttttacacgaaaagcctgacttcctgcaactctggaagttcccacactgaccataagattctggttttccttcatggctctggacagttcttcataaaacgcataaatatttgtgcagccatcctccacaatttcataatgaccggacacaacaaccggatatttttgcttccataaaagacactgatttctccatgcatttccctggaataaggggttttccttggaagctccacgtttttttgcagcctttatcagctttcggatcagctctccggcatcgccgcatacaggcagactgacatgcaggcttggttttttcagttcattttcatcaatatcgttcagaatggtatagctttctcttgcccagtcctgataccggaagcctgtctgtgcaaatccctgacgattgccaagagaaagaagcacgtcgctgttctgaagtgcaaagttacccggtcttgttcctgttcccccgcttcttcccacaaacaggggatgatccgactcaatggcatccacgctgctcatacctgttaccaccggaactcccagaagctcagcaagctgataaaagtcctcatgcgcccctgccagccgtacaccatttcccggtgaaagaaccggccgtttgctttcctgcaatttatccagaatctgctctaccgtctcatcttttatttcccggggctgctgttcaggattttcttccggatcataggctttcagatcatctgtttctatgactgccccctgaacatcaagaggaatgtccagccataccggtcccggccttccatttacagccagataaagagccttttccagatggtaccggatgttctccggatgaacgatcatgtgagcatactttgtcaggctttttactaccggaacaatattgcattcctgcactcccatgctgcgaagaggcagacctgatgcagaaaccgtagttgcatagcgcgcctgacctgaaaataccagcatcggaatggaatccatccatgcccccagaaccccggtaattgcatttgtagctcccggtcccgtggtgacacagactgctgccattttatttccaagacgggcataggcctctgccgccatggcacatgcctgttcatgatgctgataagtacagtgcagcattttatgatgtccaaaagcatcattcatatgcatggctccgcctccggtaacagtaaatacatcccggattccccactgtgcaatatattccgctatataatcagataccttctgtttcattttctttctccatatcaactgttgcttcagccttctgatatattatctgaacttttttctgcatctttgacatcctacagatacgcctggcatttctgaacgcataccatacgctttccggatgcctcaataggaatttcatctacataagtaacgtcgatctgagcttcctctcccagatatttccggtaggaagccactacctcatcttcattgactcttgtccggtcagcatttaaaagcagctcgtatcttttcttttcccactgaatgcattttgcctgatgtacgataccttccatattgatcagtacattcataaaaacatgaatggacagaggttctcccttgcagttatacatcatggagccgcggcgtccgtatatttctgtgaaataaccatgttttctgcccttttcatctgttacttcctgataaattcctgtatcgcctgtgtcataacggatcataggaaaagctttattataaaaatcagttacaacgattcttcccagttctcccggtttcaccggttcatctgaatcaaggctcagcatttcaatataaaaattataaaggtctaccgtataccggtcctcctcgccaacctggcatgcaagaaaaccgttctcattatttccataagaacggactgccgaaaagccaaagatttcccggatcaggtcatatgttttctgaggaagcgcctcgcccatggcgaaaaccatttccacatcccattttctgatatcaacttttttccttttcagataatctgcaagaactgtcagagcactggaatatgcaaccagaacctgaatcctgtcttttcgtattttttcacagatatctgcaagggcatcgtctcccatgttggagatatcgatcatgatcagattatttttaaaggatttccatttggagatcacatttttacccgggatccatacacggaactctccccgcttcattcccatgcgaaatccgttcagctccataaaggaaataaagttcatattcacacggttcattttatccccatcgcataaaacagtaaacggcgcgcctgttgaaccgcttgttttcagacggaacagactgtcttttctgtcacggaatgtatcgcagagaactgcatccatattctcgttatatttcatttttgtcataacaggaaactctgtaatatcctgtgcgtcctgataatttttataataaggagaatgctttttggcataatcaagaagcatttccacacggcgctgtgcatactcctctgtaattccctctacaatctcccttttatttactttttttattttttcaagctttccgccgtgaagcttatccagtatattaaacgctgttcgtcttaaaatttctcccgcctgcattctttttccttcctcatttatgatgtagaatcaatatcattgttttttctgttttgggccactgcctgctttccataatccaagaaggattaccgctgccacacgtattacattggcaatgagcacggctgccgcaaaacccataataccgctcttttctgtaaaaatcaacacaaggactgcaatcacagccaaatgtatgatctgaaggatcaactgccacttttcctctgtgaaagtaagaactacaataaaaagataagctgaaagtacgccaaggatctgactgaggtttacaactgtgatcattccttttactgattcataaagatctccataaaacagctttacgaaaataggagttccaatctgcgctccaaggaaaaacacaaggcttacgcctgttccgattccggtaaacagaagaaactgctttttatccattctctcctgttttcttgtaagataagaaataatgatcgtattaacaggcgccaccagaagcaccagagtttttccgatcagagaagttacgtaatattgtgttactgccagatgccccaccatatgttccagcgcaagacggtcaatattcaaagtaaaatttgtaatcagataagaaaataccaggaagcctccccgctgaaatgcctgtgtaaaccacctgctccggtcaaaaaatcctctgaacactgttccggttgcggcaagatacaccagagctgcagcctcgcctgcaagaaataccagaaaccagttttttgtaaggaaataaagtccaaagccggctatatatccgcctgtcagcacacagtaatagtaaaaatattttttataattcaggttcagacggtattccacatctccgtaataacgaaaaattgttgtcataagaagggctgccgtccagaaaataacaggcagagataccatggaatcccttgccacaaaaagagtgactgctgttcccactcctccaaacagcaaaaggaggacattatagtccccgtttttcacctgataatctcttcgtacaacaagacggctggtattcagcgcctgccccacagaaggacagagtattgcaaccagccccataagatacaaaagctctcccagctggtcgcttcccatttttcggttcagcagaggatatacaacaatctgcagaaccccattcatcagaagcgctccgcctatggtatacactgtatttgatacaattcttttctgtttttcttttgatgccaaagagaagcctccccagttatttttttatgtatttttcacaccggttttcaaaggattttctttttccggagctgagaaccgggatctcatctacatactccactgtaatttctgcttcttcaccaaagtaaggactgataaaatccaggattgctttctcatcaattacctgtctgtcgccattcagccataaagtatattttgttacatcctcctggataaaacggtactggttgattccctttgccatagaaagaccgttcagaagtacaaacggagacacaattcttcccttgcagtcatatatcatatctccccgtcttccatacagttctttcaggtacagacggaatctgccgttcttttcctttcgttcttccactgccagatccccattgtcataacggatcaggggaatggcataattataaagatctgtgatcacaattcgtccaagctctcccggttctgcaggttcatcactgtccagcttaagaatctcataatagtagctttcagaatcaatataatagctttcatcttcttcacgctgcagacccataataccgttttcttcatttgagtaccaggaacgtactgtacagttaaaaattttttccagatttcgtcttacttcactgggcatgctctctgaaataggaaggattgccttcacacaaaagtctccggtattcatatgatgctcttcaatataccgtcccagttctccaattgcagatgcatatccgatgatacactttacccgtttcttcttaataacagaaaccattttgcccaaagcttcttcatccagattggaacagtccatcatgatcagattctctgccgttctggagatccaactcttttttgcgtgatctcctacccacatgcggataaatgcttctttcattccgatataatatccgccggcagcccccagaaaaatacttgcagctgtgttatgaaggattttattgcgattctgtatcatggcaaaaggagtccccgtagagccgcttgtgtacataatacgattatctgaagcatctttgtaaacagaagactggcactgctcataatgatttctgtaagtctccttattcataacaggcattttttccagaggagtatcctctggaaaatccttataaaattcagttgtgcgaactgcatgagagatcagcttcctgattttctcctgagtcttttctatggaagtcccgtttttatagctgtcacggatttcttcataatagccgcgtacctttcctccctgaagacggtccaccagccagaatccataccagcgcagcttttcatctattaccatttacttttatcccttctctgaagtatcttttccacagcaggcttaaagatttccggcttcccggatcacctttgccatataatcgatcttttcatctgtcatgcccggataaagacctacccagaaagtatcgcgcatgattctgtctgtattttccagacttccggcaatgcggtatcctctgccttctgctctcatctgatcaaagcaggggtgctttgtaagatttccggcaaacagcattcttgtctgaacacctttgctttcaatataaggaaccactttatttctgtccactccttctttgcatgtcaaaaggaagccgaaccagcttggatcagaatcgggacaggcttcgggaagtacaaatttttcttccattccctcaagggcttttctgaggcgcgcataattatgacgacgcttttccacaaatccagggaacttttcaagctgagcgcatcccactgccgcctgcatatctgttgctttcagattatatccaaaatgagagtaaacatatttatggtcgtagccaagaggcagctctccgtactgtctgtcaaatcggtgtccgcacacattatcacggccggacgggcatctgcagtcacgtccccagtcgcggagggaacggacaatcttgtgcagaagcggattgtttgtgtacacagctccgccttctcccattgtcatatgatgaggcggataaaagcttgatgtgccgatatcaccaatggttcctgtaagcttcttctctccgtctatcatatactcagaaccaagtgcatcacagttgtcctcgatcagccacaggtcatgttttttgcagaaatcgcttaaagccttaaggtcaaacggattacccagagtatgagccaacattactgcctttgtcctggaagaaagagcttcttccagcctggttacgtcaatattatactgaggtactgtcacatctacaaatacaggaaccgctccatactggatcattggcgccacggttgtcggaaatcctgccgccactgtaatcacttcatctcccggacgcacctggcgttccttcagaagcggtgaagtcagcgccataaaagcaagaagattggctgaagatccggaattaaccagagaacagaaacggattcccaggtattctgagaattttttctcaaactcatctgcatatctgcctgctgtcagccagaattccagcgcactgtccacaagatttaccatttcttttgaatcataaactctggatgcataaggaattctatctccctctttaaatgttttctcttggttatgatatttacggcaataattatctacgattccaagaatctgctctcttgcctgctgttctgtcatattttcaaacatattttttctcctgttttttattttatatcagccagaaactcctggatctgtctgtccataattgtgtttatgtcctgccccgcctgccattcctttgtccactccactgttttttctacagcagtacgaacatcccaggccggtttccagccaaaaacactctttattcgggaacagtcaagtttcaggaaattcgcttcatgaggtccgcccacaaaatgattttcccaagtctgtccatccccccatgcacggcagaaaagatctacaagctctcctgttgtcacacagtccctgtcatccggtcctacattataatatcccgaatatctgctttcttcatactgcatggcagcaatcataagatacgcatataaaggctccagcacatgctgaaacggtcttgtggaatgaggatttcttactggtatgggctttccctccagagctgcccggatacagtccggaataattctgtctgcagcaaaatctccgcctccgattacatttcctgctcttgcagtcgaaacagcaggcgctccatccatgaaaaatgaatttttatagctgtgagtcacaagctccgagcatgacttactgttggaataagggtcaaatccatccaatggatcatcttcccgatatccccattcccattcccggttgtggtacaccttatcagttgtcacattaagaaatgatctcacagaatcggtctgacggatacattccagtatatttacagttcccattacatttgtttcgtaagtatataccggatttttataagattcgcgcacaatcggctgggctgccagatgcagcactatttccggtctgttctctctgaacacttccagaagtctgtccagatttcggatgtcgcctgttatactgttcatctgtctgtccatgcctgccagcccaaagatcgaaggttctgtaggcggctgcagtgaatatccggtaacctgagcccccatattcagaagcaggcggcaaagccatgttcccttaaatcctgtatgtcctgttaccagaactcttttcccactgtaaaagttgagatcaaatttcttcatattttatctaaactcctgtaatccaatattaagagtattatactattctttcatcacagtggcaagagagccctttgctgtttactttataaaaatatatcttgcctgagcaaaatccacctgatcttcgtcctgaagctgatactcttcatctcctttcagcattcttccgtttactgcagtgccgtttctggaattcagatctgccagataatactcatcttctctctttcggatccttgcatgcatacgactgacagttggcatcggaatgactgcatctgaagcatttgccagctttcctactaccgtcagctcctgttccagataaatcgttgccagttctcccggctctctgcttataagagcagccggtccctttttctgcccggcagaaagaactactgtttcaccacagatttcctcctgactgtcctcctcttttttctttgttccaaaaagctctcctgtaatactggtttctgccttccgttcttcccggattgtttccggatctttttttatattttcttcctttctgacctggcctgacacagggctgctgtctgtttcctgttttattttattatgccattgtgcggtctgttcctgtttccgcttcttcttttctgtgatccatgctgtaaatgcccctgctcccaaagccataattccgatccccaacactatttctattggaagctttggaatgactccccaaaaaccggctgccagtacagccagcgcagctgcaccgcctgctccacagcatagaatccagttccatggaattcttttttcctttttcctgtttttaatctcttcttttttctgttcatccggaatcacagaatctataatttcattctcctgtttctctgacagcatttcctgatatttatcttctttttgagcagctgcatttttatccgcttcatcttccttctgataaattgtctcttttaccacctcaagctgaaatcccggttcaagagctttcctgtaaataccataccccagcatcaccgcctgattatcctcatggtcaagctttggcagaatatattctgtcaatccccgaagctgcccctgaatttctttttgatatccgggaaggcagcaaaaatacacttttttcctctctgcatccatatagatgtattccggctgaagcacaagctgatccgtattcatcaggaattcggccagctcttccattacttttacaaatccttccagaatgctctgaagatcctgactccggaattttttatcctcaaacagtgttgctatggactgttttgacgttatgtcataataaaacagcacctcaccatccagattctgcaaatgacatttcagtatggacggaatcacatttcctgtaagcatacgtacctgataagatgaggtatctactgccttttcttcctgcaaaataaggtaattatgacttacatccctcttatattctgcgcgcattaccttcctcctgcatctgaaaaaatatcttctgccgctttgatcttacgaatccatcctaccggatcaatgactctggattttccttctgctctcagtttccaggaaaatcctccaaatcctgatatggtgtctgccgtatagcttaccgttacctcttttccatcctttatctgagttttcagattttcagccccaaaaaatccaatatcccccagctcctgactgcgtttcccggctgcttctcctgtgtttccgccttcccggtttccctccatacttccggtaagtgcggattcgcaggcggctgccgtcagccatgcccgattatgtacaaaaaaacaaagataaagaattcccatgactgccacaagtatcaatgacatcacacaggccgcttcaatggtaaagcttccttttttagctttttcccacaaatatttttttaatgtcatataaaaatacctcctgtatatcccagaaacaaaaatggaataaaaggaatttctgttttgcggcttctgtgaaacactgtcagaagcagcgctgataccactgcagacagaaacagcccgctgccaagggttctgaggtatactgttgtaccagtcatacaccctaaagccagcatcacccatccgtctcccattcccaaagcgcctccggtaatcacagatgccaaaagaaaaatcactccaatagctgccggaatcagaatatcctgaatttctcttcctgacataaagctgtaaatcaggcccgtactggcataaattcctgttaagatcagggaaatctcatgttttttccagtctgtccatgcactgcagccaagaaacagcgctgtaacaatttcttcgaacattatatactccctcctctatccacaactgctgcacgctcccatattatggacatccgaaagctttaccagcctgacagtacgcttcagtccgctgcaggaggactgattgtgatacctgtttccactttttgtaacataaaccgttcctgcaggcttctgatttctgctgcagctttcacaggcataatatttttctccatacatgtttctggcagattttacacccgcgcccgacatttgctgcacaacaacattcagatatctgcatcccggatttctgtgatatactgttcctgaaacagttacatataccattctttctgcctgatctccattatgggcaaatcttctgctgtccgcgcctgtccaggcatgtacctttactgtattgtgcatccgtacttttgggagaggaatcactcctcccaccggagtgtaagagtaaacatccggcaaagtgatctcttccgttccttttccatccagcacataggcatacattcctgcctcctttgttttttcacataatgtacgaaggtgttctgtctgaatctgatagatatccataaaagaaatcagtgtaaccattcccagaaaaaacaccggcagcacaagagctgtctctactgcaaagcttgcctttttcagaaaagaggcgcaaagagatacctttccagaaaacactctgcttctcctgcccatcggggtaagcaggtatctgaagcgcaacagagaacttatcctttctttcctttttctgtctacccagttcttatgatccttcccatttatgaatttatatgtctcctgaaaaagcatctttctgcacctcttttcttgtccttttatacataactgaattgctttgttactgtaaacgtttttttcctgtttgcctgtacatccacagaagcctctattgcttctatacagtgatccagacggaactctttctgtccggtggtatttctgatacagcactccaccatatccattcctctctgaagcttattgcttttagactgagataaaagaagtatctgaagatactcttcgtaggacattccattttcatcactttttctctgactgtccagcccctccagaatatgcgcaagattatccagtgaaagctgccagttcccggagttctttaccagcggaacttttcccccatgaaacagttcccttaaatctaaaatactttctccaaaggaccagcagaacagaagcgccgcctctatgatcacagcagccggaggaatcagaaaggcagaggcgatggccagtgccagaccgtgcatctgcgctctctttgcaggatcagccataagaaaagcggcatttacgccttcacggacaagaagcagtctccttgcaactgacttcagattttctgtgtcacttgtttttccgcacagcagatattccgtctggtattttaatcctccggaagcaggattagtatagcagccaagcttatccataagatactgctgaaataaaaggctggaagcataggaactgtctgtttttaccggctgtgtcatctccattcctttttcaagatctcgcccggaaagaagctcagattttgacacacagttttctgaaatccctttttctgccggaaccaccagatcaagaaggctcattttacgtattgcctttaagacaggaatcggattttctatcttttcttccggtttcccgtcagaaagatcttcgcctgatgaaatatctgtgtctccactttctgaatttccggactctgtctgctgctgagctgcctcctgactgttctgggctgctgcattcatttctgaatcataactttccaggaatttgttttcctctgcctgcgctccggccttctctgcatcttccacgcgatcctttttttcctgaaatttttgtatcagtttctgaacaccctgactgccaagggtatctttcatgtatgaaacagcctgtctgtaaaacacttctccgttttcatctgtagccagacgatacccggacaatcctccctgaacaacagataatttctggctgttctgcttcagtaccggtttcatatagctttccagatcatcgtatacagcagcaaggtttaatgtccccgaactccctgagccattcagaaaaaacagatcgtattctttcagaagctctctgtcatactgaccgaacagagaataaagccctatatccagaccgcttaaaatctgcgttcttgctgctgccattctcacagattctatactggtacataccagggacagtagaagactgagaatcagcgccagaaaaattgtaatactaccctttttcataacagataccctccttttcccaaaatttcatttcctgctcccggatttattccggactgtttctcagattgaattgctctgtttcgtgatctttgaaagaatattttttaccagactggtcagctgctccttaaaaataataaccagaccaatcagaaccaccagaatcagaataatttccacaacgccaactgcatcctcttctgcggcaaatccctttgccagttcccacagttttttcatgtattcacctccccgctcctgcttcttcatccataaaaggacagaaatgcaggaatcataataattgccattacaacagccagcatcatcaccataggcaccagaagctttgttgctgccgcttccccaagaacacgggcctttcttttccgttcatcccaggcctccagggcttcctgttccaggatatccgccattctgcggcttcccttctggagattctgaatcagtagtgtggaaaacgtcttatatttcatctgtccgcatttttccccgaaccgtctgtaagcctcgggttctgatactccgctgtccatttcataacaggctgcggccacagcctcataggcaaaatgccgtcttttcgtttttctgcgctcataatcatcagccattttccgaaatgcgcttcttgctgtcattcctgcctggattaaaagagcaaacttcatcaccattcccggataatccataagaagctgttccgcacgtctggcttcctcttcctgtttttcccttgtgcttttcagcagaaccacaaaggcagcaaacagtcccagggatgccagaagctctcctgtatgttcttttggatgttcccattccaaccgatgtcccttccactctgaaggcagataatagtaatccggatcctgtttttgctgattatactgatccagcatttcctgaaattctttctgtcgtatactttcaggagattccttttccgaaacggtttcttcctgctcttccgtttctttttccggaacctggattttcagagcttcgctttcctctccgtccaccgaaatcagatactctttttcatatgagcctgtctcctcacggggaattctgtatgtatccggctgtactgttcctccttccccggtcattgttacagccattccaaggaagttcccgcacacagcaactgtcagaaacaaacggactccttttttatctcccaacgcgtccagatgaatccatccggccttactgatcaggactgtcccaaaagccagaataaatattacaatatgcacccacataagctactcctgtacttttttccacaatcttttcctgtttatacttcaatatccacaattcttttccccagccagtaggaaagtccatagattcccaggcagactgtcattgcgcacacgccaaagggattcccgtacagaacctccagaaagcccggagaagtaagctgcagatacagtataattcccgcaggcatcagactcatgatcatctgttctgccttttttgcagaaagagttgtctctatctcctttctgacatcaattttatctccaagcattctggctgatgtctgaatgatcttgtccatatcgccgccggaacgctttgctgtgctgaaaacagcggcaaaattttcaatatcctcaattccgcttctttcaccaagtccaagaaacaattcttctacgggaacgctgactttcttccggctttcaatgtaatgaaattcacggacaatatcagcttccggaggatacagccgctccatatccttcatacatgctgtcacggcattctccacagaataacctgcctgcactgcaacactcagagaattcagggcatctttaaactgataattcaaagtcctcttcctctccctgatatgctgtctttttttccattttaaaaacagcactgctgccggcacagccgcgatcatgcaccaccagttctgataaaacagataatccactgtcccgcacaaagctgtactctgaaaaagatatttagcgacttctctttttgtataatgatattcctcataattctgctttgttttgtcctgattcatatttccacccctgcccgcgccagcttttcccggttcaaaagctctgacacctgtacaagctccagatcttcctccctccgaaaaagagtccgcgttataatctcatttttttcatagccacaaacttctgtaatctccagtacttttcttgttttgtccctcattcggcccagatggatcagaatatccacccccgaggcaatctgtctccgtattgcctccaacggcagatccacccccataagcgtcattgtttccagacggctgagcatgtctctggcagaatttgcatgagctgtgctgagactgccttcatgcccggtattcagagcctgaagcatatccactgcctcacctcctcttacctcccctaccacgattctgtccggccgcatccggagcgctgtttttatcagatcccggatactgaccgataccgcaccttccatatttgccatttttgcctccagccggaccagattttccacgccctgaattttcagttccgcgttatcctcaatagtgatgatccgctcatcttcaggaatataatcagacaaagctccaagaaacgtagttttgccgcttcctgtaccaccgcctatgactatagaatacctggcccttaccagagctttcagaaaccgggcacattcacaggtaagacttccaagcgcgatcagtctgtccattgtaatgggagtgtccggaaatcttcttatggtaagaataggaccgttcagcgccaccgggctaatcactgcatttactctggctccgttctccagtcgggcatccacaatcggcatggattcattgatcactcggttgcaccgtcctgcaatctgctggatcacatcctcaagcttttcccgggaggtaaagcttttatcccatttcccaagccgtcctccccgctccacaaagatcgcatccggaccgtttaccataatctctgttactgtttcatcctcgatcagttcctgaagtacatccagcttgcgcaccgaataaaacagttcctgcctgagctgaagcttttcattcagagatatatacgaatccctcatacggttcaggataagctggtcaatctcatccagtatctctctgtcagtcatttctctggacatatccagtttttccatcagaagatctcggatcgcctgaaaagtctccctgttcatatgttttcctttcttatcagttcttttacgtactctcccagctgactccatggaagctgttctacatatgccccgtttccggaaatactttcgtgaaacggaagcttcattcttaccgtttttgccagcacctgaggataatccagcactcgcagaagattttcaaactgtatgatcttacattctgaaagtccgtctgaacacactggcatataaatccttttgcaaagatccagcagctgaaacacctcgtcaatcccatttcctatatccagaataagcacctcataagaactgtgcagaacaatttcctggatcagacagacccaatcctgccaggaagttcctctgatatccataggagactgaaccggaggaacaaagtcaagctgtcctactgtctcaaccatgctgttcagcctgactgtcagattatgatccccctggcgcacaaaatacagaaggtcacttaatgttcctgtaaagctctttccaaacagttcttcaaatcccgaatattcttccagattcagatacaaaacaggtttttccctggcggcaagctgacccagagtaagagcaaaagaagttttcaggcagcgtcctaccggagaataaacgcccagtatctgtgtggcttttttcagaacaggagactgcgcgggcagcactgatctctcctctccataacaggccataacctctcttactatctgggcagaggactggtacttgtaaatccccgcataggcgctcagctccggagacttaatgccttctgtaaggacgatcagctttcccacatccagctcccgtacctcccggcacacagctgcctctgagatcagaaggatctcgattctgttctgctctgcaaaagccagcaaactcttcactccggtaaatgcctgtacctcaaaagtaagattctgttttctgttcagatactccataaagtttttggcatattcagcctccgtgtcgcaaaccgcaaaaatctgttttttcaatatatacctcctgcataaagcatcacactcataaaaacaggaattgtaaagtgaaagttttccaatgcgaatcctctgtgatagtagggtttcctgatccctgttctcagataatcttccagatatgaggtcagatagcgcagtctttctgcaggatttccgcagaatatcagaatcgccagagatatgacggctcccgccagaaaagaaaattcaatacagcgccagatatcatgcacccccataattcctccaagagcacaaaataattttatatcgcccggtcccagcatcctgaacacaaacagccatccaagagccgccgccggaatcgttacaccaagaaaaaattcatatggaccgtttccatttctgctgaagcaaaacagaaaacctgtcagaagagaacaaaggatccagccattgctgatccgcatgctggaaatatccattacaacaccaaccccggcaattgtcagcactaacattccttttacagtaattcagttccttccccctttctctctgctgttattctttttcataaacagtaaacgggtacttataaaaataataaaatgggataaatccgtctgaccagacggcaggaataccagaagatttctggtgagtcttattatagttctttcaagcctgtctgtccacaaaattcgttcatcaaattccgacaggaaaatttgcagattctgttgtaaaacacccttcttttcatcccccattccgtcaccctttctttttaactgaatatttattcttatatattgcatatttatttgtttttatgtataatatctatatttctatgtgaatatatacatgaattgttcacaactaattaccgaagcctgatcagcagaatcagcaatatacaaatactgaaaaagggcagttcctgtttcgtccttataccggaacagacagaactctgtacactttttccatttgcttatttacagcagttatataactcatacaaggagagataaatatggaagcaagcataaaaaaaatagaagatatgtcgctgaatgcatggccttcccataaaatggaactttatgacggatggatcctccgtttttcttatttttatacacacagaaccaacagtgtggaacagtttggaacctcctcactgccctggcgggaaaaaatcccttactgcgaaaatgtttacaaacgcctgggaaccccggcaatttttaagatcagcccactggtttctcctgattttgattacaccctggaaaatcgcggatatgagatccagcatacaacagatgtaatgacactgtgtctgagggatgcccggctgactgccgcctttgatgacgtacagttcacagaagccattcctgattcatggatcttcagtctgtttgacctgaaaaaaatgacgaatcccgttcacagggaggtggttccgtccatgtaccatgcaattcccaaggaaactttatgtgcttctgttcagaaaaacggaaagatcattgcaacaggacttggaatactggatcgggattttattgggatttatgcaattcacgtaaaagaagaattcaggggacagggcctggcccgccagatctgcacagggcttctgaaggaaggaaaaaaacgcggagcagaaaatgcctatctccaggtagtacatggaaatgcccctgcccggagtctttatacctctctgggattccatgacctgtatacctactggttccgtgtacagcctgtataacagcaggctccgatcatatcaaacagcttgttttcgaaataacagaacaggacgcagtatcaataccacgtcctgtatggggaatcgaatatgtaatttttggtcaaaaaatttctcctgcgtaccttatactgttctcttttccagtacagcggaagagctgtgccctgccaccatagaggtcagaggactgaaatacagaaggcaggtcagtacacagtagatcggagtcataattgcaaactgaacaagtcttcccggcatgatcgcataaaaattatatccaagcataatcaccagtccggccgttgtcagacacagagagctgatgactcctgtaatgacaatagaaaccgaaatccccacggtctttgcctttctggatttgcttaaataaaattttctgaaaagggccggaagaacgccccagagaatggatgccagtgtaataaacggattcaccgcatagcctttcagaaagcatcctacaatatctgcgcacagtccgcagactccgccggcaaccggtcccatccacagtccggcaagcacggtacatacggttcccacagtaatacgatatgggcccagatccagtaccagaacccttgtaagtactagctgcatggctaccagaagcgccataaaaacaagattttttacattccagatagattttgtgctgtttttctgcataataaaaacacctccataatgttatcataaataatattccctccacattatgagatgttctcatatgtagcaacgggtgcggaaaatatatcgtaagctttttctgtcatcagcttttcgtttcacggcgactccccagccagtgaacacttaacgcataaattcctacttcgctattatttatttatctacagtataacacactttacagatatttcaacacttttctgttataatattaacaccctataactgaataaaggttactgttcacagcaacttgatctatgaacagtaatgaataaaatacagtttttttaccatactatctctcaaaaccattgccaacagcataaaggaggggtatgatggaacacagaaaactttcggatcacagttctgtaaaaaaaactgaagatccttatcatgtatattacgaaaattacctggacaccaatgcctgtaccgaatgtacagggctgatgcccaatgctgcccacaacagagaggaatgggatgcctaccgggaaatctttgatttcaccgccaagcctccggctgcggacagcacagagaaacctctgtccgcaaaagacagcctgcaggaaacgtccggtaattgatcatactggaggacattcatgaaaaaactatcagctgctcttctctgcacaacacttctttttgccgtttccggctgtattccgtctgagacttctgacggaccagtttcttctgacaagccggaaatccaggctgatgctccacagaatccccgggtatatatggatgagatccggggaactgtaaaggattttacaggaagccgccttaccctctgccaaaagtcagatacctacagctttgacatctcacaggcagagcttgaatgcagggaaggacttcttgccggggctgacgtctgcgtaatctatgaaggtcagcttaacaccactgataccagttctgtcagagtcctgaaggtggcagatgcctaccacgacagagcggaactgaaagaaaaaaagacttacggacaggttcagggacttacagaaaataccattaccctgaaatcaaaaagcggcaaaactgccacttatcctgttaccggaacagaacagtattatcagaacggactccgtcccggaggctgggtctatcttcattacaggggagattttggccagggtacctcagaaaatccaaatattctggacgcatcacaactgaaggtgctcagagtctccgatatcgatcccctgaaagtacctgaacctacccccactccgccgcctcagccggatactgctgttccccaggaaaaacagcttcgcactgtgatccgctctgtaaatatgaacatacttcaggtatcgcctgacaattccgacactgtactgaagcttgacatgtcttctgtaccctgtcacttcagcggaggaattgcaacaggagctcatgtgaatattacctacacaggagaattcaccggaaccactctggatggcataactgtactgggaattacaggcgaaataccggaacaggccaacaaacactccatttcatctgcaatctcaggcgagatcatcggatccactgccaataccattacgattatgagcccggatggaatcagtcttactttttttaccgatacagcccagaactcctctacaggagggctgcttaccggaagcagcgtaaagcttacttttgatccggcagaatcccggaacaccaacatttatacctgtgtcaaaatcgaggatgcctgaaccgggtttttattgcattttcaccctgtctcagccagttctccagatcatcgctgtctcccagaactgaccggaaggcagtatactcatcaacaattccgtttccatgcattaccatgtaggcgccggcgtcgcttcccagagccacctgcgcctttttctgaaatgcaagaaaaagattttcttctgcttttctgataatagggataagaactctgtcctcatatcgtccgcatcctctgagatttctcacagtcacaagggtggggacccagactgtacggctgtctgccagcatggaaatacattcctcatccatataattcccatgctccaggctgtccactccggcttctattgctgcctggactccatatactccattggtgtggctcataacggcaaagccttcttcatgtgcgatatgcaccatctcacaaacctcttttttatccagaggggtgccggtcacctttccctgatctgcaaaatccagaagtccggtagtcatgatcttaataaaatcagcgccctgccttccggcttccagaacaagattgtggaattcttttaaatccgtaaagctttttcccacaatacttccataatgtcctgccttgtgtatggcaaaagcagaggtacgatagtcgatatcatactccggcgccagcttccgggccagaacagaagccccgtaaggatctcctccgtctctgacaaagcttattcctgcctttttgtaggcttccagatgctctctgattattttttcgtctgctccgtctttatgacattttacagcttcccggtaattaattccgtccataaatatatgagcatgacattctccaaacattttctttcatctcctgctgactgtgtgtgttatagtttatttctcaaaaaattttctgatctctgcctcaccggcatttactgaaccctgggcaaaaaacggccttccgccgcctcgcccgtttaaagcctgattcatctcttttataaactgccggagatctccgttcttttctccgacagcatacctgtagcttccatctggattctctgaaaaaacagcgcagcggcccttgcatttctgcatcacagcatctgccattttacgcacactgtctgcatccatcccctgatgaaataaaagcacatttcctgctccctcccatctttttgcctctgtatcacacagctcctgttccagacggaggatccggcctttcagacggtaattttcctcctgaagccgttctactgcccgggctgtttctgtggcttttgccgataacttcacagaaaccttatgattctgttcattcaccatattcaaataatccagaaccctttttccacttatcatggtaactcttacaccctcacggaaattttccacactgaggatttttaccattccgatctctcctgtatgggtcacatgagttccgcagcaggcgcagagatctgcccccggaaaacgtacaaggcggattttccctgtcagttcttttttacttctgtaaggcagagccgcaagctcctctttatccggataaaaaatttctacaggattatcctcccatatgtttctgtttgtttgttcttcgatctccgccagctgtttctcatcaagaacaccgctgaaatcaatggtgatcacatcgctgctcatatgaaaaccaacattattgtatccatatgcttcatgcacaagaccgcttactatgtgctcccctgaatgctgctgcatcaggtcaaaccttctctgccagtctattttaccgatcacttctgttccgggttccaattcgctttttacataatggatcagctctccgttcttttcctgaacatctgtaaccgctgtatctcccagaattccaagatcggatggctgaccgcctccttccggataaaatgcgctctgatccagaatcacctgaaagcctttctcctcttttcggcattccacaacctttgcagaaaactcttttatataaacgtcttcataatataatctttttgtgtctgtcataacatcttccctctcctgaaatcgttcttagtttatgtcaggtaccatatactgtatctcttttccagtatatcacaggtgcctgcctgagaacagtcccccgggttccggcaacttagtcaaaatacattccaaatcaccttcggtgacggcattttgccctgtatgtccccggaatcctggcatgtatgcccaaacacctcccgggataattcccctttaaagtcccctgtatacagaaagagcgctgtacggcaatccattgaaataaaattatttctccaaatgccgtctgaagcgctcttctgttgggtattatctatattcagttaaaaagaaagagtgtatttttctacggaaatttccgcttctccctctgccgcaaaggtaattccctccgcattctgaggagtataaagggtaaaactggctgtctgtcttccgccattgataaagatttccaggctgaaccggtccatcagacagcgaagtgttatcataccgtccacaggctccactgcaatctcacgtctgtgcataatatcatacagatagccgctgtggcttcggtccacacaaagtaccttcctgtggatatcataagaaacagaagtataataatcctcattctgcgcaactttcatggagaaatcccggaaattatcgtctgccttcagctttactgtcatatcgatcacacgtccggaaactccttccagagaggtttcttctgttatttttaccttttcgtggcagacccggttgcttctgtatgcctcaatttcccgtaccggcttctggatcagcctgttatccttaagagtcagctctcttggaactgtcatctgtccaaaatactttactccgtcaggcacaaacttggagttgctccatgcctgcatccaggcaatcataatacgtcttccgtcaggagctttcattgtctggggcgcgtaaaaatcaattccactgtcaaggggctgcacgtcttctctggtaaaagcatggctgtttttgtcataggttccggtaagataaatcgttccgtgtcctacatggaatttcagcccctccggcatcatttccattggacttaccacaagaacctgtttgttgtccagaggaaagaaatccggacattcccacatccagccaagctttttgcagcttgagtcaatgacgctgcaaaattcccagtgaagagcatcctggcttttatacagaagaatggagctgtttccttctgcattggcattggacgccacagcataaaaggtgccgtcttcctcctgccatattttcggatcacggaaatcaactctgcttccgccttccggcacactgtctgctgtgattacaggattgttttcatacttctcatagtctgttccatcgccaaacgccatgcactgtgtctgatgatccctgcggcttccatcctcttctatgaccttccgcacgcctgtgtacatcagaagatggcgtccgtccgcaagttcaagcgcgcttccggaaaagcatcccgcattgtcatattcctgatccggagccatagccgccggtctgcgctcccattttatcagatccctgctcaccacatgcccccagtgcattggtccccattcattggcataaggataatactgataaaaaagatgatactggcctttataatacgaaaaaccatttggatcattaatccagcccgctccgcctgttacgtgatacgtcggtctttcctccgggctgatctcgctgatccgttttttctcatattctctggcctgttttaataattcacttgtcgtcatattgtattcgcctttcagattctttttaccggcttttttcagcccttgattcctgatgaggcaattccctccacataatatttctgcatgaaaataaacataatgatcattggaattgcagagacaaccaatgctgccatgatcgcactgtagtgaaccggctgtgttccaaagaaggactgtactgcaagctgaatggttcgcttatcttctccggtcataaccagaaacggccacataaagtcattccagtgagctacaaagtcaagaataaacacggttgcatatactgttttggaaattggtacaacaatcttaaaaaatgttcccgcaggactgcagccgtcaatggccgctgcctcgatcagttcgtccggcacatcacagaaaaactgccggaacatataaatggaaaagcattttgctataaacggcacaacaagagccggaagtgtattgacccatccaagctgggacatttcaatatacagcggcagcatgatcgcttccattggaagaaccatcaatgcaatcacaagattcatgatcgcacctttgcccttaaaatcaaatttcgccagggcataaccgcacatggagtttaccaaaagatcaaaaataagaatcaggccaatgtaaagcaaagtatttttgaatacctgaggcatgttcagccttgaaaacacctctgcataattgtccagagatgcctgaatgggcagaaatgtagccagggaatccatgtctgcaaaaatctttgcctccggcttcagagatgccgagatcatccagatcaaaggagatacaaaaataatgccgatcacaatatttccgaagtaaaacataaatttgccgaatttagcagaaaatttcattgatttcgtcataaccatatcctcctttctcagtctgtagccgctgtaacttttttcattgccatggacaacgttaccacaatcacaaagaatactgctgcaatagagcaggcatagccgaagttacccttctggaagccctgggtgtaaatataatacacaagtgtttttgtagaatttttcggtccgccctgagtcatgatataaggctgggtaaacagcttcattgcctggatcattgtgatcataacaacatatttcatggttccctttagtccgggaagggtaatatacaggaactgtttaaatttcgtagcgccgtccaccgctgccgcttcatactgatccttggggattccctgaagacctgccaggaagatcatcatctgatatccagccccctgccatgcagacatgaagataatcgagttcattgctgtgtctgcgtcgctgaggaatttgataggctccattccaagggaaacaagaagagagttgatcagtcctgtatttggattcgcattataaagaactgaccacagaaccgcgattacaaccatggaagtaagctgaggactgaaatacattgttctgaaaatggatacgccccggaatttttttgagacaagaagcgcaagtcccagagcaagagcacactggatcggtacaacaagaactgtaaaataaaccgtattctttaatgcgatccagaagttcttatcactgaacagcttctgataattttcaagtccgataaatttgattgcgtccggtctcatgatctgatatttgaatcctgagaaatatacagtataaatcatcggaacaaccagaaatgcgatcagaagaatcactgcaggagctacaaacatatatgcagtaattctctcatctcgtttccggcctgtaagtttttttgtctttgccataatctttccctccttttcctgccagtaaaagaaactgagaggtcagaaacagccgcaccgccaggcgatgcggctatcccgtaaatttctcagtctttattctgcataataggtttcataatcgtctgtaaatgtttctgctgctgtgtcaagctcggactggatataatcctcatccacttcctcattactggatgcatcagagaaaatatttgtcattgcttctgcatatgcagatgagaaagttgcataggaaggagttctcggacgcggaactgctgtgttttcaagctgctctttaaatactgcgcgaacgccttctttgtattctgccatttcctctgtgtcataagcagaaatacgggttgcaggttttgcaatagccgccgcataagaagcaacattgtctgtattcatcagccactgaaggaatttacctgctgcttccggattttcacaatccttgcttactgctgccgcccagtcgccgcagggagaaacagcttcctttgtatcatcattgaccggatagtaagttacgccccagtcaaactctgcactttcctccagaacagctgtatcccaggaaccgccaatcatggttgcgcaggctccgtttaaaaattcatccttgatcggctcaacatttgcatagccttttgcgatcagatcagccaggaaagaggtagtttttacagcttcttcactgtttacataaccgtcagcttctgtaccgtcctcactgatataatcttttcctgcagaaagatacattggctccagtgcataaggaagtccctcgccgtgatccataataatatgagtgcctacataatcctctgtggtacatttttctgcaatttctgcaagttcagaccaggtgatcggattatcaattgtgcgggaatcaagatcctctacatccactccgcattctttcaggtagtctttattgtaataaaatgccacggatgactctgttgcgccaatagcatacagatgactatcgtatgtgttctgtgtgattgctgaatccacaaagtccttctgatcttcttctgtaaagtaatcgtcaagaggaacagtcagaccattggctgcataataggatacctgagggccatccacataaaaaatatccgggagatcattggatgtctgagcagtggcaattttgttatcataggcatatgagtcagaacggtcaatcgcttcacgtttcacctggatatccgggttttctttattccattctgcaagcttttcttcccaccatgcttcgatcgcttctgtatctgtggggctccagatggtaagctctgtcacatcatctgccattaccggtactgtcgttgctcctgctgaaagagcaagcgctgctgccattgccatactgattgcttttttcatgttctcttcctccttaatctgagttctttccgcgcgcctggaaagcagggaacctgttccatatatcacagtctgcgctctcttataaatttatttgcgctctctgtggaacccgttccatattgtgccttaataataaaacctactgacttatttgtcaataggttttatctaaaaatcatattcaaaataacatttccgtctgtttttacagttttaccattctttttttgtatgtattgcacaatcagaagtttccgtccagaacaacaggatttgtagtcttcccctgatgaacctctacagacatgatctgtttgtgtggaacccgttcacttccatcaataagttttatcactgtagaagcgcaggtgtccgccagaaaacggatattctgatcaatacttgtaacctgtgggtaacagagcctggtaatatccattccgtcataagccactactttcagatcttccggcactctttttccggcctccattgcaagatgcatataacagagcgccggctggtctgcagcaaacaccccgtctattccgtcgcacttgcgtatggcttcccttgcggcatcccagtatgcctgatgatcaaacttgttccattccatcatcagatctacgatttccactccgtgttcggcaagaatcgactcaaaaatggcatgtctgtcattggcggcaacattaggcgccactccggtaatatgaaggactttcctgcacttgtttttaaggataatctctgcggcagcccggcctccgtaaatgtggtcggaacctaccatgggaatctccggtccgaaatcctgatccagagacacgatcgttctctttctttttaagtattcttccacatgaagggtatgggaaccggttatgatcccgtctaccatattccggtccagcatattcagataatccagttctctgttgctgcttcctatggtattgcagatcatcactttatatcctgctttataaagagcaatctctgtctcccttgcaaaggcggaaaaaaaaggatgatccagatccggaaccagaacgcctataatgcctgtcctgtttttaaaaagatttcttgccagctcatttggggtatattccagttcacggatcgctgactcgattttttttcttgtatcttctgcaacatacccgctgccattgatcactcttgacacagtgccgactcctacgcctgctttttgcgctacatctctgatacttgccataatttccttcctgataaatactgcagttcttcatctttccactgatctgctactgctgacctcgttcacagcggccacattcatttctgtctatacactcctttgccgaaacactgcccgaatatcataacctgtcctgttatagtcaaatattataacatattcttcttactttacaatctgtccagtgtatgaaaataaacggatttttcgtcaaactgtgtgttctgtacagcattttattaaaaactttccggttttatgaagtttttgttctttttgttccgttataatataatgaacgggagaaagaatgccgggaagcttcattgccgttcattatccaggcagcatcaggaagggggatgatcgtatttcacaggaagaatatttgaaatatctgctggagcagtatcagaatctgatctactccatctgtctgaaatccgtaggaaacccttttgatgcagaagatctgacccaggaagtatttttatctgcttacaaaaacctttcccgtttcgacggcacctatgaaaaagcatggctgagcaaaatcgctgtacgcaagtgtctggattttctgaaggcagccgggcggcgcagtattcccacagaagatacttatttttctcagataccggacacatcctctactccggaggccctgtatctgaaaacagattctgaccggcaggtatataccctgtgccagcagctcaaaagcccctataaagaagttgctgtttcgcatttctgtaaacagcttactgttacagaaatcgcccggcagactcagaaaaatccaaaaaccatccagacacagctttaccgggcaagggcaatgctgaaaaagctcctggttccgccgggaaatgtcaacgaaaggagagtctgatatgcatgttagggaaaaatctctgaataagattacagacagcgatacagtaagcacggaagaaatgattgcgtttctggagcatcttgatcagtgtgatttctgtctggatcagatgattgaagaagaaatccgaaataccgatcagccggctccggactatctggcagaacagattctgaaccgtgcagccgcgccggatgttcaggcggcaaaggctgtacgcacaacatccagaaaaatgcagcttttttattatggacttcgcactgcaacaggcatgatcgctgctctttttcttctttttgttattcagcaggcggatctcagcactttttccggagtttctattccggaatccggcaaatctgccatccgcacagaagtcagcgctcacccggaaacactttcacggctgtcacagaatatttctgcagagctttcacgcagctctgataaactgactggttatatacgaaatttttcaaataaaatcttaaatggaggcgatttaaaatgacaaaacaaaaaaaaggacttttgctttttctctgctcactggttccgggagccggagaaatgtacatgggcttttttaaacaggggatcagcattatgcttatattctggggaactttcggactggcaaccttatcttcacttagttttatcgtcatgtttcttcccattatgtggtgttacagtttcttccatgtacacaacctgaaatccatgtctgaggatgatttttatgcggtggaagacagctatcttctccatcttgaccagtttattggaaatgcagaccattttgtaaaaaaataccgcaaactgattgctgttttcctgatcatcttcggtgtttctattttatgggataatctcagaggactgatcatgtggctgcttccggatactgtggcaaatgtcctgatcaatctgttttataatgttccgtcaattatcattgccattgctattattgctgttggcatccacatgcttaatacaaagaagcaggagcttgacagcgaagagacttcagaaaaaccccggaaggaagaacactactgggagccttatcgtccttatcagcagtcccgggaggaaacatctgaagctccaaccgcagaagcactgacgccggaagcttccgaacagacaattgtttctgagacatcttctactgatgaaaccggcgctcagacagttactgagcccacagagtctgctccggcttctgaggaagcttctgccggaacggaaaagacaaactgacccctgaatgtcttcacagtccagatcagctataactgctgaaaacaaattcaaaaaatatcaaaagcaaagtaaattttaccctgccaaaaacggaagccgtcctttgataaatcatcaggacagcttccgttcttattataaatatttcttctgtttacaggtatttcttctatataaatacattacagatttttcgttacgcgaagccttgtcattgcccttgccagagccagctgattcatgtggtattcctgaatgctctgcttctggcggagctgttcctctgcgcgctcctttgcctcctgagctctgcgaatatcaatttcttccggtctttccacagaaaggcaaaacagctttgcacggttattgatcatttccacaaaaccattgctgactgctgcaaccaccttgtttccgtcagcatcttcataccgaagctcaccgggaacaattgctacaatcacatttgcatgatgagccagaaaagccttttctccatcctctacaggaacaaccagagatctggcgcgtccggcataagccagcttattgctggcatagatttccaggccaaatgtactttccatgaacttcactccttactgttcaagggtttttgctttttcaataacctcgtcaatagttcccacattaaagaatgcattttcaggatattcatccatctctccgtttacaatggccttaaatccacggatggtttctttcagcggaacgtatcttccggggattccggtaaagttttccgctacatggaagggctgggataaaaatctctgtatctttcttgcacgatgtactgtatttttgtcttcatcagacagctcttccataccaagaattgcaataatatcctgcagttccttatatttctgaagaatttcctgaacacggcgggcaacctcataatgttcctctcctaccacgtctgcttccagaatacgggaagaggattccagaggatccactgccggataaataccctgctcaacaatttttctggataatacggttgttgcatccagatgggcaaaggttgttgccggagccgggtctgtcaggtcatccgccgggacatatacagcctgaacagatgtaacagaacctgcttttgtagaagcaatgcgctcctgaagctctcccatttctgtagacagtgtaggctgatatccgactgcggacggcatacgtcccagaagcgcagacacctcagaaccagcctgtacaaaacggaaaatattatcaataaacaaaagcacgtctctgtgttctgtatcacggaaatactctgccatagtaaggcctgtttccgcaacacgcatacgggatcccggcggctcattcatctgtccgaacaccagggcagttttttcaagaacccctgattctttcatttcgctccacaaatcatttccttcacgggaacgctcgcctacaccggtaaaaatagaataaccgccatgctctgttgcaatattctggatcagctcctggatcagcacggttttacctactccggcgcctccgaacagaccaatctttccaccttttgcataaggtgcaagaaggtcaattaccttaattcctgtttccaggatctcaactgccgggctctgatcctcaaaacttggcggatctctgtggatgacccaatgttccttatcctccagagattcaccgccatccacagtttctccaagaacattaaaaagtcttcccagagtgcagtctcctaccggaaccttgattccgcttcctgtggcaattacttctctgtctctctgaagtccctcactggcacttaacataatgcagcgcactacgcggtttcccagatgctgtgagacttccataatacatttttttccgttgttttccacttccagggcctcccggatatccggaagctccccctgctcaaaaacaacatccacaacaggtcccataacctgtacaattttacctttattcatccttgtcacttccttctctgggcttttgcgccgctgataacctctgtgatttcctgtgtgatggccgcctgccgtgcacgattaaactgaatggaaagatcctgcagcatcttttttgcgctgtctgtggaagactgcattgcagtcattcgcgcattattttcactggcataggcttctaccagacatccgtaaataacacctgtcagataattgggaatcattgtatccagaaccacatctgcagaaggaaacatttcaatctcctcctgtggagctcccaccggaatctgagccggtgaaaaacttgcttttttcagcggaagaagctgcatatccacaggttccatcactgccgcattttgcatctgagtataaataatatgtacctcatccagctcacggtcaagaaaagctcttacaatttcctcactgatcagtcttgcgcgatgcatagttggcttctgcacagtataacgaaagcttccgtctacatctgcacttttcttttcataatactgacggcctaccattccaagtacatacagcttgtgataacccggagttttttccataaactcatctgtcagctttgtgatattgtggttataggctcctgccattcctttatctccggttactacaataattccggttttacgctcctgctgaggtacaagatgacgaacactgaaaaaaggatgctggatatccggaatatgacgcaggattctggcaatagcagcctgcatattataaaaatatggctctgtatcctccagtacctttttggctttcttcatttttgaagaggaaatcatgtacatggcattggtaatcttcatggtatcctggacgctttttattctgctctgtatttctcttgcgtttgccataggttcctcctgctcttaattattctgcagctgaacggcttctgaattcctctgcaatctgaaggatcttttctcccagttcatcagaaagctgttttgactcattgatctctcttcccacttccggataaacattgtcaaagtattccagcagctccttctgatactgcttgatcttttttgtttccacatgcacaaaggctttatgcgtagctgcccacagggtgattacctgctcatggagtttcagcgggctgcaaagaggctgtttcagaagttccatcagacagcttccataagtaagctgcgcctttgtggcctcatccagatctgaactgaactgagtaaatacttccatttctctgtactgagccagatcaatacgaatacttcctgatgcctttttcatagctttggtctgagcggcaccgcctacacgggatacagaaagacctacattaactgccgggcgcatgcctgcaaaaaacagatcgctttccaggaagatctgtccgtctgtaatagagattacattggttggtatatatgcagatacatctcctgcctgtgtctcaatgatcggaagcgctgtaatggagccgcctcctgatttttcattcagacggctggatctttccagaagtctggaatgaagataaaatacatctcccggataagcctcacggcccggagaacgttccagaagaagggacagagcacgataagcaaccgcgtgcttggaaagatcatcataaacaatcagaacatctttcccctgatacataaagaactctgccagggctgttcctgcatagggaacaatatactgaagaggcgcacagtcacttgctgtagaggaaaatacagttgtatattccattgccccgtgtttttcaagagtggaaacaacctttgcaacagtagaagccttctgtcccactgccacataaatacagatcacatcttttcctttctggttcaggattgtatcaatagccagagaggtttttcctgtctgtctgtcgccaatgatcagttcacgctgtccgcgtccgataggaaacatggaatcaatagaaaggattcctgtttcaagaggaactgttacggatttacggtcaatgattcccggtgcaggatattcaacaggacgatactcctcctctttgatctctccctttccgtctaccggagcgccaagagcattgacaatccttcctataaatccgtttccaacaggaatacctgcctgtctgccagttctggatacttttgagccttcacggattccggaatcgctgccaaacagaatacatcccatactgtttgtgcggatatcctgaaccattcctttcagaccgttttcaaaaaccacgacttcaccgtacatggcatgatctataccatatactgtggcgattccgtcacctacggaaataacagtaccgacctcctggtttttgctgatctcgtcataattctctatttcttctttcagaattgaaataatctcatctggattaattgtactcaaactgttcacctccgggtcagtttctgttccagtctgcggcagcgtccccgcagactccagtcatattctttaccgcctgcctgaagaataaatcctccgatcaggcttttgtcctcaagtacctgaatttctgctttctgtgcctgaaattccctgcacaggaaatttcggattccttccagctgttcatctctgggtggcgtcacacagatcagaactgcctgcagggcgcctgcctctttcctgcaaagctcctgatactggttgaaaatttcctcaaaaagatctgttttatgatatctgcaggcaaccttcacaaagctcctcatatcccggggaacagctctgtctatgatccggcattttgcctcaaatgataccagcggacttcccaggcactctgtaagttccgggttctcctgaaaaagatgttccgtttcctggacagttgccctggaaacaggcatcccatacagaacctttgcataattaacagctgccgttgtcatcgggatcacctgctttttctataaattggtcatacatggaaagatcctgttcctcaccggcctgactgcctacaattctggcggcagcctccattgccagcttcccgatctcaccctgcatctgtctcatggcgcactcacgctcagacgcaatatctgcctgcgctttggcaaacagctgatcagcctgaaccctggcttcctctgcagtacgttctgcctgagctttcgcctccagttttgcctgttccacaatctgataggattcttctttagctgatttcagagcattctcatattgcttctgcagctgatttgctctgtcctctgtcttttttgcctcctcaaactgctgatctatcatttcttttctctgatccatgatccgaatcaccggtccgaacagaaactttttcataagtatgtaaaggaccagcagattgatgatcgtaaagacaagattcagattaatttgaatcatcgtctgtacctgcctttctgtttttgtagcaatttatcagccaagcataacaacgatcagaagacctactacaaaaccaaaaatagcagtaccttcggcaagggcgcatccgagaagaaggtttttgctgatcttgctctctgcctcgggctgtcttgcaattgcctcaactgccttagatgttgccagaccaataccaatacctgctccaatacctgttaaagctgcaatacctgctccgatagcgattaaacttgtcatgattttttcctcctgagttttcattagaatagttaaataaaagtgactgcgctgcctgctgcagcgatcattccattgtttctttcatgaacatggacgtcaaaaagacaaaaatatatgcctgtataaaaccgtcaaagaaatcaaaatacaggctgaatggaattggcagaattgccgggcatacaaactcgacaagcgccattactacaaaccctccgagaatattgccaaaaagtcggaaacagagggcagtgggacgaatgaggacctccataatattcatcgggagcataaccggtattggatccagaaagctcttaaaaaatcctttcagaccctttttatggatgccgcagtattcaatgaggaacatgctcattactgcaagtgccagcgtaacattcaagtcctttgtaggcggctttacgccaaagatacctgacacattggaaactcccagataaataattactgtcatcatatacgggatataccgatctccgtcctctcccaggattccccggaaaaagtttctcagagcgccgattcccgcttccagaagaagctgtttttttccgggattttcaactttcagattccttaccagaatcagcgacaatactaccagcactgccatgatcacccaggtaactgcaactgattcaaataccggtattccttttccgatcggaatcgtaaaaaccgtttcacagttcagctcttcttttaacacttctgttaaactgttcgtttcactccctccttttctttcagtctgagatttggtcagaccgcttttttcgatttctatattttactcttcacgccctgaaagtcaatatttttccctactattttgcacaaaaaaatgggtgattttttgtgcaaatcacccaaacttattttgattatctatatttttaaggatacctcttcataggacaaaatactctccgaaccgtctttttccaacactttgagccttccgtcccggcatatttggagagcttttgcagttcgttcccctgaattgtccataatacagattctgcgtcccacaaccatgcttctgtctatatattccccggggatgcaaagcttctgtgtctctctcagaagatggttgatcactgctgctgccagttgatttctgtttataccggaagcttcttcctgacttttataaagagcaccggcaatcccatccagctctgaaggatatcccttctccggttcgtaaatattcagtccgattcctacaactgcaaactcgatgtctccgctctcaaaatccgtaactgcctctgtaagaattccacacacctttttaccgcagtagtaaaggtcatttacccatttgatatcaaggtctttgcccgtcagttcttttaccgctttatacacagccactgccgcttcagccgtcagaacaagactttcctgaaggcttccttccggttccagaatcacgctgagatacaggcccgcatcatacggtgaataaaactttcgtcctcttctgcctcttccttctgtctgcctgtaagccagtaccgcgcttccatgctttgcttccccgcttattgccgcctgcttggccgttctgttcgtagattccgtctccggataaactttcagaaaaacatccggctttgacaaaaaaggacgaatcccctcttctgccagtttattgctttctgcagacaacatatatcctttattggagcctgctgcaatttcatagccttcctcacggagagtttttactgctttccacaccgcagctcttgtacactgaagctcttccgcaattttttctcctgatataactgtgcccttatttttttccagaagctccagaagcctggattttaccgttatttttgtcctcatttcttccctcattatttctcagcgcctgttttaaaaaggttgtgtattctttcctgatcttttcagggccaatgatccttactccttctccaaggcctgcaagccagccaaaaaactgcttacccacacagacatgagcctgaaaaagaaaatgctcttcatctgactttcttatggtaacctctgtgccaaatcggtccagaactgttccgatcagatgattgtcaaattctgctttcagaagaacgtctctgccgcctgacattccaaacgcatccatggaaaatttaccaagctcaagatcccggaaaatcgcagctccgtttcttttttccttttccagctgcatatctttcattttatctgcctgataatgcttgacaactccgctgttctcatccaggccaagaagataatagctgtcatctctccagaaaagtttccacgggcttattttgcagaaagctccgtttttcttctgtctgagctttttttcagacgtccattcataataagaaaagctgatctgcctgtctgcggcaatggcattgcagatcagctcaacatttgcatatacttctccattttccgttctgttcccgcattctgtcaatgcctgtttctgcatcttctttgcctgatgaatactggtcagcccttccagtttacggataagcttctgtgcatgtctggccggaatacagtgagaagactgaaccatgtctgtgagaaattttaattccgcaaattcaaaattcctctcttccagataatatcctgacacctttcctcttcgattcagaatattaagcccaaacagcctcaaagcctcaatatcatcataaattgtctttctctctgcattaatgccataagcctgaagattggcaatgatatctctgacctgcatgggatgatccctgtcggatttcttttcaagaaccttttttacatacaggatcttcagcttctgattaaatgatctgggcataaacacactcctacctgtctgtcagtcccgctacaactccaaaatatactaccacaaatgcaagaatcaatgcaatccggtccacagaatgaaaatccacatgaagaaacatcgctccaagaattataatctccaaagtcagcacaattccccagagcaaagcctttcctccggaaagcttttcctttccctgtttcccgcgtcctctgccgtatgaatcatatttatccggcacaaatgcagccatttctctgtctattctctgcccactctgcatcttcagttcctccctgtacaaacatattttctgaacacttctttttgataaaaaggattatatcacaagctatgtccaataaaacgggatgaacttatttttttcgaatctttgttcgtgaatgtctgtttttatctataaagtctggggctgtttgcagttttccacagcttctacggttcaataactattttttccacctgatatctccccgcatccacatgcataacagccatagtgatctcctgatcaaatctgcgtcgtccgcagcttcccggattaatccacaaacggtcatcaattattttttcaaaatatttatgggtgtgtccgaaaacaacaacctgagcacttccaagctcccatgccacatcttttttgttatgtgtcataaaaaactccacaccttctatggtaaagcgaagagtccgggacagcccctccgcccagtccttgtcattatttcccctcactacataaacagacgccagaggccgaatctgatcaaggatttccggcttattaatatctccaccgtgcaaaatgcagtcgcaggttctgagaatttccagaacctcaggacgcagcagcccgtgagtgtctgatatgattcctatttttttcgccatgtttaccctccgtttccttggtaaatttcctttataaattttcccgggaaatttctttgataagtttcctccgggaatttcaactagaatcaggaaatttgtacactttttcagagtttctgttttatagttaatagattgttatccggttatgagcaatctccggatctgtaaaaatgaaccctacatgagtaaatactgattttgcttttatactggggaatctggaatatacacatgcaaaagaatttttcttgttgtaacagcctccctattctggtttattatataaaatttctaacagtctgtccgcaaattttctgtgtccttcctgggaaaaatgaacgccgtcatatgccacagtaatttcccagtctcctgtccctgtaaaatccatgttcagctcttcagctactttactgtatgtcttatccagcttttccgcctcccggcagattcgttcctcatctacccaggctccccgctttacaggaggaggggcaatcagccggactttcatttcccggttattaatttcctgctgctgaaccagtacctgaagaaattttttcatacgattccctgcatcttctgcggtaaatcctgtctctgtcaaaaaatcgtttgtccccagcataatccatattcttacaggccctttgattttacaccagtctctaagctgttcacagaaaaagtgaatctgagaagaattatgagggatacagcgtccgtttactccatgattctttatgagccacccggatttttcctgaagaatgcctgtccagcagatattttcaggatacctgccccctgtcagcgactgcggatcatatccgtaagtattagagtccccataacatatgattgttcccttcatttttctctgttcctttcgcttcgccttcatacacaatagcataaaaataatttctgcttccagagctttcttatggcaagtctcacagctgaacgtcctgccgccaataactgagacaacattttttatacttatgcgctttgctgttctggctttgcatccatggttttacatccattatatatatataagattcccttattcagaatttaatttttacctgtttacagatacaatgaccaaaaatcccacaataacttctataaccaaaatcaccggcacacccacaaagaattttgcttttcttgttttatgatgaaacaccttcattcccaacaacgctccgatgctgccgcccagaacagccagtcccaacaacgccttctctgaaatcctccactgattccgcacagctctctttttatcgattccatatgcacaaaaagctataatatttataaaaatcagatacaaagcaaaatatctgtacattaattctttatcctttcaaaaaaccaaatacatgtccccaatatgtttccaaaatatcgtcctgcgcattaaaaatctcatgctttgttcccgccatcctgatcagagtacaggaggtttttccacaattattaatcttttccgcaaaaatatcctgcgcttttaatgaaaccaggctgtccgtttctgcctgaaacaaaagtattggcgcagcaatgtccttccatgcgcttctctgaagataccagttcatttttgccgcattatacagccacccataagatggagaaaacgtccggcactcaatattattcctgcggatctctttataacgttcaaaccgtggacatgaaagaccggaacttgtctcaaactgttccgttccgtcatatggcttctggcctgctacatacttcatttctctccctgttctgcaggctgcccgggaaattctgattgcagcaggataagggacatttcccgtcagaggacggatcatcggagaagacaagattacttttttgtatatataaggctctcttgccgcagcaattgccgctactgcccctcccatagaatgagcgaataaatacagcggcatcccgggatgcgcctttcttatcagccttgaaactctcagaaaatcccggctgtatctgttccagcggtccaaatgaacaagcgacggatcatcggtaagacgataactcagtccgtgcccgcaatgctcaggaaaataaacatgataatgctcctgcaaaaaataataaatcagctcaggatatttctgcgcagattccgaaaatccatgactgatgaccacaacacctctggccttatctgccagatatcttaacacatgaactctccccctgttttccggcgcacatggaatccatgcctcacttaccctacgttccaaatacggtaaaacctcattttgcattttcaaaacatattcattttcatgaataatttttctatatctgtcatccctctgcatagcggtaatctcctctctgcttctttcgtataagtaaaattacaaaattctggaaacctttcaaaaaaaacattcatatacttttccctttttaatatgacatattcatagtaaattccagcagcctaaactctgtatgattataaaaactgtcccagctttttcaactcatttcttcttttctgataatccggcagttcctgctccacaatagcccaaaatctggctgaatgattcatttccttcctgtgcgcaagctcatgaaccaccacataatccaaaagcgcctgaggcatcagaaccagcttccagttaaaattcaaattccccttctgactgcagcttccccatcttgtcttctgctcccgaactgtaattcttccataatctacgcccattctctcagcaaaaaacgctgtcctctccggaaaaatcttcaatgccttctgaatcccgtctgccctctcctgttccgtgatcacatgccttttaccgctcagttcctgaatcctgtctttctgcttttctatccagtccagatgctccctgacaaaacgatcaattttatcttctgacatcctcaacggcgcccgcaccaccactgttccgtcccccttcacctgaagagcaagactttttcttttggaacggatcaattcatattcttgagaattctctttcatttttgtatatttattcatcatttttccatctcataagcatttctatttctcccgtagcctcatcttctgcctcagaactaatctcaaatccattgcgcaaataaaatctggccaccgcctgattctttttatatacagacagactcagctcttttttcacggattttgcataatccagaagctcccttccaataccacaggaacgaaacttttcatccacaaaaataccggcaatatagttctccatcattccaataaatcccctgatatcgtcatccttctcatacacatatacttccgcctccggaagcatggaacgcacctgctgccagttgctccgccagtattcctccgggataaaatcatgagcctgtatattagaaaaaagccatatatccataactttatcaagatctgttaacttcatttttcgtatcatacgcctgcctccggtgggtgatttcaacaatggaaatacatagaaagcggataaaaatgaggttatccaaatcctctgaatattctcatgagacaatcccacagggatgccagaaccagacttctcatacactttcacttccataaaacttagttgaatctattcatattttatcaataaatatacttactctgtgttctattctgattatataatttcctttttcttgcaattgaatcttacggtgtggagccgccagtccggtgtaacaagccccagaataatcagtaatgagcaatcactatgaatcaattatagcaaagaacaacaaaaaaacaatgaattactaactttaatttacactaaaaaaatcccaatatccggtttaaaaatacagttattagaaaaacagcagacaatcacatagactacctgtcgtttaagatacttcgtatcaatttttattattaaaactcgtctcacagaagattaattacagtgatcttaatatcgttttcgctacttttcattgctgtattcgccatattttctgtcaagattttgactggtataaaaattgtactcaaattgaactcacgccaacttaacaaaaattattctttgatcagaggcatattgatcaattcctgcaatactgctttatccggcaactgcagtttatattctgctaccatcatcggagacatgtttctgctcatcgcatgctccactacttcatcatccttagaagcacaaagaatcattcccacactaggattcttattctctttcttctgacaatctaatgcctccagatagaaatccattttagagatatattccggtttgaatttaccaattttcaattcaaaagcagccagacacttgagtcctctatggaaaaataacaaatcaattcggaaatcttcgccaccgacctgtactcgatattcttcatcaatgaatgtaaaatctttgcctacttccagaatgaactctttcatattctgaatcagaccttttcgtagataagactccttgaaattctttggcagatcaagaaattcaataacataagaatccaaaaacggattctctttcaatccctttattggctccggcaggagtttttctttggatagaatatatctttcgtaataaccactattaatctgtccatccagctctcgggctgaatatgattcctttatgcaaagggttatataaaaatgtctctcttctgcagtttttgctttggacataatagcaagatggttactccaactaatttgtgtcaacagtgttgacacaaattgttttggatgttcaacctttcttaatatgcaataaatagaacaaaatactttttgttttcaccatgtttctcaatactcattatattcttgattatttagacttttcggaattttcaattctacaacctaaattttataaatatcctctgttttttgcctcttcaattaatttgggttgaattagcggatatgtccaattttctactaaatcatccgtaattaatattttctctatctcactatgtatttcttcaaaagaaaatatatctgcaaagaaaagcatgccaaatgtttcatcgtcaatgctttcatttactcttgtttttcccttgacagaatcggtttgatagtaaagtctatcgcacccgtttcctccatcagttctcgcttagcaatagataaaatatcttcgccactttccctgtgccctcctgggacttcataagtatctctttctctatgtttacaaaatatccatttaccatttgttttggagataataactgcaaatttcaataatttatcatctatgctatcgtaaaactttacttctaccatttataaacacctctccaaattatttctcttcttctcattttatcgcactcagattccaaacaccattcctgtcttcgctaaaaggacagattcatccagaaaatcagagatgctgaagaacatgtggcaaaactcgccatccagcagtttggcagtattgagaaatatactgaagaaatgaagcataatctgaagcatttctctgaaattatggaaaagtggcagtcacagatatcggaagaaatacggagagaagataaatttcttaagttggcttcccataaaggagacaatgtgtcctccaaggctgtccaacagcttgtaagggatactataaccggcgcactggcaaattcccccaatctgctgcccaacaatgcggaaacctactgtcaaatgattatctcagcaaagtatttgacacaaaacatggtgcaggaagcagcgaatatattgtaaaagccttcccctattattccaaaaataactgcataaaaaacaattagagccaaaggacataaatcaaccccggaaatgcctattttatcagcatttccggggttctgcctgctactcaaattcgcaaataaaatcttgttactatacatttttgtatagaaattatagttctatctgattttatatgtgttccactgtccaaagtccacagaccgtactgaatggtgttatcaatttgttatcatgattatgttatcaatcgaagattctcgtaatatcctgatatcggttaactactctataaatctccacatatttatctccaaccttgtagataatcacataatcttcccatatcgcatatttataatctgtccgaaagctgactcgttttgaaagatctgagcccattcccggaaacatctgaagattttcaaatttaccgtaaatttcctttatggtctttgtagcatattcttcgttatcttcagcaatataatcccggatatttttcagatcttttgcaacaatcggattgatccgcagttttaacatcctattcccccacaagtgctttcaattcgtccaaatccagccaaccttcaccgtctttcactgcttcttcggcttcctgcaacttcatcagaagttttttctctgcacggtcacgctcgtaatcttcaatatccataactacaaaacgtcctctgccattcttggtcaaatatactggctctcctttatgacagtttttcaaaacttcattataatttctcaaatcagacactggtaaaatatttgccatattctttcagctccttcctttgatttcatattatttctactacttatattatacacaaaaagctgtaaaattcaacgtagatttttacagcttttatactttcatataatttagcatttgttgttggagacgtaattgacggtggtattacatatttatcatttaagccttgttgtgataagttaaaagactccttgcgtgatacactgttaagtaaccctgagtaccaccctacgaaagaagaaactattatcattgacactattgagattcaagaaatgtaattcaatattcctaaaaaaaattagagccattttagatccaaaggacataaaagaaccccggaaatgcccattttatcagcatttccggggttctttccgttattcgaattcgcaaagttctacttgttctatagtatttattctatgctcccgttttaaaacagtttgttttcgaactgttttgtgcagattttctatgatttcatccaattgtattgtcattttattgtcagcaacttgtacaactgaaacctagaatttccacatttactttaatctttttaaagtaaatgctttatgtagcattactattcaaatcatttctggtatcttctatcaattcttctaaattttttttcatctcatcatatttgcttttaacaaagatttcaactctcgaaaactgcatagcgattttctattaacgttatagaataaagcccactaatatgtgggccttacaatgatgtcatgaataaattatagcaaatattttattctaaaatgctatcataatcatcttcatctgtatcaattgtacaatcacagttggaacattcccagcaaccatcccaatacataatgcaaccacattcaggacaatctttaattttggttccgctcatatcatcgtccaattcaccggagcaatatggacaactagtatattctgattcatcatatactctatcacaatctgggcacatctgcattcctttcacctccttctacataaaatcttatcataaagaaaaatagttgaaatcttctaaagcatttcttctatattttctttaatcatcatttattattctaatcaaagtatcgaatctataatcatttataacgtctcttatgttgatgttttctagtcagtttccttcttatgatctttctatatattcatttaattttctttttagatcctttgagattggatatcttttaattttttgttttagctgttccttagtttctcctcttcggtataattcctttaccactgccgaaaagatagcgtccactccgtattttgatataccttccgaaataagaccaattactcccaacgttactaatccgccaatcattcctcctggtcctatggcagctaaagctgttgtaatagccgcaccgcctgctaatcctgtagctcctattgcgactgttaacactaatcctggaactcctaacgctgcaattttagatactatcttatccatctacatttcctcccttttttctatctacaacaaatttacttaatgcactttccaacaaatttgttgcatctggtttttcaagtaatattgaaattattctatcaatactaaaagttctaataatcctatacattaacaacacatcatctagtgtaaacgtcgatttattagatactataccataataattaaaaatttgttcaagtatatgctgaacttcctgtgattttggaccgtattccattgccttctttaatgaaaaaatcatttcataggatgttctaacttctttgtattatcaggcacactataataaaccgatttttcaattttcatgcaaaataaaagaggtcctggcataaaggaatctgacgtattttccatcagattgttttaccctgagacctcttgtgttatcatatggttttgtaaccacgaaataaaaagcagaaacctccccgaccaaagttcgatttctgctttcacccaaacatagcttacgctatattcatgcatacctatgataacagtttatacagaaaactacaaccttatttctcaggatttttacaataaaactattaattctcttgatctggaccttatttcatgtaactgcggccactccggctgtctcatccgttatggttcttacatacgcaacgtccagcttactgaccgtgtcctctcactttctgttgtccgtgtattctgcaaaacctgcggacatacccatgcattgctgctttcatccatggttccttattcgcagatccctctggttctgcacgtccgtctgatccatgcttatgagcatgaaaccggattccggaacatactggcagaacagtacctcgtggatgaaaacaacctgaaatccatcatccggaactaccgtttacattggaagcaacggttgctttccatgaggcttcacctccccgatatccccagcctgatttcaggatgtttttccctcttttccagacagttcatgcggattaaatcaacctccaataaactttttatcctgccaacataaccttacacgacaggtctggttttatcctttatccttaagaaaaaggaggaagatgaaacttatgaaacaggaaaaacaacaggaaatcgcactgatgcgctatggcgccatcgcacctatcattgcaggacttgatgaacgttatccaaacaaaaccgctttctacacagaaatctctgccaaaggacttatgggaccggatggaaagctccatcattatgctcccgccaccattgaaaaatggtatcttgactaccagaaccatgggtttgaaggtctcgttccgaaagggcggtcagatgccggtgtgagccgcaagcttgacgaagaacttcaggagaggatccggtattttaagaccaactatccacgtatgtctgcagctgccatttacaggcagctgagatccgatggttctgtcataaacggacaggtatcggaatccaccgtctgccgctttgtaaaccggcttcagttggaactgcggcagacaccgaacaaggatatgcgccgatatgaacgccctcatatcaacgaagtctggtgtggagacagcagtgccggtccccgccttacagatccggatggaaaaaaacaccgggtctatatcattgccctgatcgatgatgccagccggttcattaccgggatcgatgtgttctacaatgataactttatcaatctgatgtctgttatgagatcagccatagcaaagtatgggcgcccaaaagttttcaactttgacaacgggaaatcttataagaacaaacagatggaactccttgccgcaaggatcggtacaacactcagttactgccagccatacactcccaccggaaaagccaagatcgaacgctggttccggaccatgaaggatcagtggatggcagcccttgatatgcgggatttccattcactggaagagctgaggggaagtctgtacgcttttgtccagcaatacaaccaatccccccattcttccctccgtggattatccccacaggaccgtttcttttcagaaccggagcagatacgccggctttctgaggaagacatccgtcaaaatttccttctggagattgaacgccgggtatctgctgacagtgtgatcgtcatcggccagattgaatacgaagttgattatcgttttgcacggcagcgtatccgcctgcgctattccccggatatgaaagaaatcttcattgtggaaactgacgggacgctgacaccaatccggcttctgaataaagccgaaaacgcattgataaaaagagaaaaagtacgcttatgcaaaggagacgaatgatcatggattacactgcaagatacggactggagttcaatcctttcctgaagaactcaaaggaagtcctcgtagaaacacaggaatacaaggaggttctcttccggctggactacctgcttgccacaaaaggcttcggcctcctgaccggaagcgccggaagaggaaagaccaccgctgtcaggaactgggcttcgggactgaatacttccctttataaagtagtttattccagtctttccaccctgactgtaaatgatttttaccggaatcttgccgctgaacttggcgcccagcctgcattccgcaaaaccgataacttcaagatcatccagggtgaaatcaaccgtctcgtacttgagaaacgacagacgcctgtcatcatcatagatgaagcgaactatattggaaacgcagtgctcaatgacttaaaaatgctgttcaactttgaaatggattcaaaagaccgggcggtcatccttctttccggtctgccacagctcaacagcaccctgcgcctgagcatccacgaacctttccgccagagaattgtcatgaattataatctggaaggcatgacaaaagcagaaggacattcctatgttactgccaaactgaatggtgccggatgcacacaaacggtattcgaagagaatgcactggaagcgatcctcaatgcagcgaatgggactccacgtatgatcaacaagctgtgtaatgcaagtctgttggttggaaacagctcaaatttaaatatcataaccgccgatgccgtcatgcaggcaatcaatgactgcgagctcggataactttagaaaccatcatgtaaaataatctgcatgatggttttttacataaaacagtgtgccggaatcgtccaaaactatgtgattgataccgttgtcaggcactataaaagacctgttttaatgtgacggaagaggcaacgtttaatttgctggataacagctatttccgggcaaacctgccttgcctgccacaatgccatacctgtttttactccggctcgctttgcaatataattcacagtcagcacaattccatgtcttgcttccgtaaaagcaattcatatctgaatgaagaattgtcctgctcataacattcacctaccagtctaaaaatcgtaataaaacttctttgcttcatattgactttgtgaagtttttgaattataatttctactaactcagcgaacatttgtttgcattttatacgtgataatgaactctgtcaatagtttttataaagttgatgaagttacgatttcaaaaacttagaaaggatcccactatgaatttttcagacaagattaaatttcaacgagaacaaaatcatctgacgcagaaagaacttgcagaactggtcggcgtatcccagcgtgcgattgcagcttatgaaagttccggcaccatcgcacgaatctctactatgagaaagctcgctcatgcataccaaatcccctataaccaggtgcatgtcaaagaagagagcagaatatgaagatttcagtagttggaagcatcaggaaactatgatttttgaaattgaaaatttcagacaaaattgtataataaatttaaagtgacttgtaatgtttttgggaggaaattatgattcgtgtaaaagatattgcaaatatggtcggagtaagtcctactacagtgtcaaatgttattcacggaaatacaaagagggtatcgcaggaaacagcacagaaaatcagcagtatacttgatgaggtggggtatattcctaatatgggtgcccggcttttgtcacagaatacttctcatattattggattggtaataggttttgattatcttcatggtgaaaacgccatgcaggatccatttgtcagtacatttgttggacaaatttccagtgaaattgaaaatgccggttactatatgatgattatcagaggtgatgattgccggaaagttgctgaggtggcttcgcgatggaatgtagatggtcttattgttctgggatggaccgaaaagagccataaaacattaaaaaaaatgctgaaaaaaccaacagttgctattgatacatatgtgagtgaccctgaactggtggtaaatgtggggacggatgattttgatggagcctatcagcttggaaagtattgggcagatcatggattcaggaaaacactgtttctgacagaaaatactgcagagatggatcagtgtcgatttgccggatttcaaagagcgatgacagaggcatttggagcgtgcaaaaaggaagaaagattaatcttactttcgtcgagaaaagaagtacgcagattacaatatgatgaactgctccccaggttcagggaggcgggatcactcgcatttatttctgattatctcgctatagatgctgtcgattattttattgataagggagtcagggtacctgaggatatatcgataacagggtttgatgataccttttatgcagaacttattcgccccaggttaactacggttcaccagaatattgggttaaaagcttcaactgctatgcaattattgctgagactgataaaccgagagaaattgccggaggaagagagaaatataaagatcgccgtacagttggttgtaagagagtcagtaagaaaaagagaatagaaataacaaaaggaatcagatctggggagatttggttcctttttagttatatttcacaaaagcagttgcaatgtattgtgtattgctatagttttgcagaaaacctattgaattattgtgaaaaatcgtttataatacaaattacattaaaggtttagcgcaaaaccaaagaaatatagaggaggaaaaattgatgaaaacaaaaaaagtgatttccattgggttagcagctatgatgagttttactgctcttacctgttctgcagctactgcatatgccgaagaaaagaaagatgaggttgcaggaggagaagatgtaactatcagtattatgggaagaaaggtagaaatacatgatgcaatgttagaagctgccgaccgttacatggaattacatcctaatgttacagttgtaatggaaacagtcggcggtggtgatgattatgacggtactcttaaaaccagattaaatggtggaaatatgccaaccatttttactcttcagggtcctcagaattgggatgagtggggagagaatatggaagatctttcagatcagccatgggtaccttacatgacagaggcagcagcagaaggatccactaatgcagagggcaaggttctgggacttccttattcaatggaaggatatggatatgtatataataagaaaatatttgaggcagcaggaattgacggggaaagtcttaaaacgtatgaagaaatagatacagctttttccaaattaaaaaccatgattgataatggagacttaaaggatgagttcccagatctggaagctgttatggattttccggtaaaagaaaactggattaccggatgccatacgattaataccggattaaatcaggaattcccggatgaaaatgcagcctacgaggcaaaggaactgaaattcacaaatgcagaggaattgaagcagattatcgattttcaggtgaagtatacagctgcagcagataatccggttgaacttctttctggcgattattcacagagcgttggcggaggtcttgcaattgaaagagttgcagttttgcagcagggtaactggatcaatacagaaatggcagatgtaaatccggaagttgcagataatcttggaattattcctatacctttaggtgatgtggtcagtggaaaactggcagtaggtgtgccttgttgctacaatgtatacagcggtgcttcggatgcagagaaagaagcggcaaaggattttttaaactggttatttcagtctgatgaaggaaaagatatggttgttcataagatgatgtccgttcctgctttctcaaattacgatggtgtggaaccggaagacgcacttggaaaagttgtaaaaaaatatttggatgaaggcaacacaacagcatgggtatttaatgcttttccggctggctttggtgatgtctttggaaacggtgtacaggcttatgtttcaggtgaaaaaacatgggacgaagttgtaagcgactgtaaagatgcctggtcaaaggccagaagtaagtaaaataaaaggatgccgttatagtaaatgacggcatccttttggaataggagtggatataataatgaaaaaatctaagtcagggttttggatttgcgtgcttcctgccctcatctgttttgctatggtagttctgattccggcaattacaggtttattatattcttttacggattggaatggaatgaataaacctgtcagtttttccggacttgagaattacaggggacttatcagtgataaagtgttctggcgggattttctttatacggcagtattttctgttgtagcagttattctggttaatcttattggatttgcacttgcactgctggtcacacagaaaattcggggagctaatttgtttcgtactgtgttctttatgcccaacttgattggaggtatccttcttggatttgcatggcagtttgtgtttacacaggggttcaattacttaggaaaatcactaaatatttcatggcttcagggatggttgtctacaccatttacatctaccgttggattaatgattgtagttgtctggcagcaggcgggatatatgatgatcgtgtatatagcacagctgcagagtattcctgataatctgattgaggctgcagaaattgatggtgcaggaagactgcagcgtttaaaaaatttgatattgccattatgtatgccggcatttacaattggtttctttctgacactttcaggtaccttcagactttatgaccagaacctggctttaacaaacggtggaccttatggctctacacagatggtatgtatgaatatttaccgtactgcatttggagagaatgatctgggccgcgcacaggcaaaggcgctgatttttgttattgtcattgcaattgtatcgttgacgcagttgtattgcagtaaaaagatggaggtggaaatgtaatgtgggcaaaacgtatagaaaaaatatttatgcaattgctgggagtaatactctccattgcgtttttgtttccaatttatgttctggcgattaattcattcaaacctttgcgggatatttataaaaatgctattaattttccggaaacatggtctgttgaaaattatataaaggcgtttgacaggttgaatttttttaattcatttacgaattctctaaagataacaggactaacggttgttattatcatttttatttcttcacttgcagcctgggcgctggtaagatataaaaccagggcgagtaatgttatttttatgatttttgcctctgcaatgctgattccgtttcaatgtgttatgcttccgcttgttcggaatatgggacaacttcatttattaaacactccgggtttgatttttatgtatcagggatttggatgctctatggcaattatcctgtttcatggatttattaaaaatattccactggaattagaagaagctgctacaattgatggatgcggaatgttcagaagatttttctgcatagttctgcctttgttaaagccaatcattgtgacagtggcaattttaaatgtaatgtcaacctggaacgactatcttcttccatctcttgtaatcaataaggaagggattcagacattgccattaaaaacatttttattttttggacaattcgcaaagaaatgggatttagctacggcaggattagttatgtgtatgataccaattattattttttatttgtgttgtcagaagtatattgttaaaggcgtaacagaaggcgcagtgaaaggataaaaatatgagtgtgaaaaatcagtggtggaaaaaaagtgtggtataccagatttatccaagaagttttatggatagcaacggagatgggattggtgatataaacggtattgttgagaagcttgattatttaaaagaacttggagtggatgtactgtggctttctcctgtttataaatctcctaatgacgacaatggatatgacatttctgattatcaggatattatggatgattttggaacaatgtcagattttgacagaatgttacaggaagcacataagcgaggtctgaaaatcatgatggatcttgttgtgaatcatacatcagatgaacatccatggtttgtggaaagcagaaaatccaaagataatccatacagggattattatatttggaaagaccctgtgaatggaaaggaaccaaataactggggagcgtgctttggaggctctgtctgggaatttgacgaacatacaggaatgtattacctgcatttgttctcaaagaaacagcctgatcttaattgggaaaatgaggaggttcgtcataaaatatatgatatgatgaactggtggtgcgaaaaaggaatcgacggattccgtatggacgttatcagcctgctttcgaaagtacagacatttccagacggggagtgcaaaggcggtttgtacggagacagtgacccttacatctgcagtggaccaagaatacatgaatttctcagagaaatgaataaggaagtattgtcaaaatacgatttgattactgtaggagaaacagctggtgtcactattgaacaggcaaaaaaatatgcaaatcttgatgggtcagaattaaacatggtgtttcagtttgaacacgcttttctggcaaatggaccttatggtaagtggacagataatccggtaccgttgttggagttgaagcaggtgatgagcaagtggcagacggcactggaaggaaaggcatggaacagcctgtactgggacaatcatgatcagcccagggcagtttccagatacggaaatgacagttctgagtttcgtgagatttcagcaaaaatgctggctacctgtcttcatatgatgcagggaacaccatatatttatcaaggtgaagaactgggaatgaccaatatctattttgacagtattgatgattataaggatattgaatgtatagataattaccgtgaattaacagaatcgggtttgataagtaaggaagacatgattcgttatctgggattaagaggtcgtgataatgcaagaacacctatgcaatggagtgattcccccaatgccggatttactgtgggtacaccatggattaaggtaaatccgaattataaggaaatcaatgcggaatcacagatttccgataaatcgtctgtgtttcattattataaaaaattgattcaactgaggaaagaatacgatattatcatagatgggcattacaatcttctacttcctgaagatgaacgcatctttgcatatgaacgaatattaggtggacaaaaactgttagtaatatgtaattttacacaggaagaagcagagtgtactttggcaaacataaatgagggaactgtacttatttccaattatgagaaccataaaccgcatatgatgcagccatatgaagcaattgcggttctctatggggagtaagtgttaaacatcgagagattggatatcttatgaatttgtagtatcagtgcgagcgattaaaaggctgtcgtaaaagacagtctttttttatatgataaaacatgaaagacagaaatttatagattttggacagattattttatgggcaatatgcggtagtaatgttatgataaacacacttaaatatgcaaggtgaacaataacttcttggaattctgagccttgatttttcacaatgtcattaacttaaggaatcttttacattttgaagtgtaagaggttccttttttctgcgattttgctgcataataaaaatagataataggtgtcttttccatgccaggacctcttttattttgcatgaaaattgaaaaatcggtttattacagtgtgcctgataatactttagaaacatcaatacctactgcattcatggattagtcactcctaataattattacaatgggaatataccagttttactcattacctattcaatctactgtggtgtgacacgaacgtatcatgtgacagttcaacctgcataaaacgaacgctgcgaatgagagctggttaacaggctatgatgaggacgatatgtccaaggaggcctacgttataccattgcgctttcattctaacagcttcagtaataagttggttagtacataactggtttattacataactaaccttattagtattgtagcaggaggccttttattatggcaagaagagaaaagaaacctgtacacaaagtagtaatgacagaaggaaagcgaaacatcattcagcaacttcttcaggagtatgatattgaaaccgctgaagatatccaggatgcgcttaaggatctgcttggcggcaccatcaaagagatgatggaagcagaaatggatgatcatcttggctaccagaaatctgaacaatctgataacgatgattaccgcaatggatataaatcaaaacgtgtaaacagcagctatggcagcatggatatcgatgttccgcaggatcgtaaatcaacatttgagccacagattgtaaagaaacgtcagaaggctttatttcagacgttacagataaaatcatgcctcagatcgaagactggctgcctacgtcattcttggcatcaacacagaagggaaaaaagaggttctttcaatcactgtcggtgataatgaaagatcaaaatactggctgtccgtcctgaatgagctgaagaatcgtggtgtaaaggatatcctgattatctgcgctgacggtcttagtggcattaaagaggcaattgccgctgcatttccaaaaacagcgtatcagagatgtattgtacatcaggtaagaaacacgctaaaatatgttccggataaggacagaaaagcgttcgattctgacccaaaaacgatttgccatgcttccgatgaagagaaggctagactggctctggatcgggttactgaaaaatggactatgagcattcggaactggggacaggtctacggcgaactcagcattatgtatgagggacgactcccagaataacagaatctatatgcatgatgagaaggacgtttttgacgtctgctcttgacatgcccgaaatcatgttgtatatatagcaagagctggaagctccaatttagcgcttccatctcgatcattatcatagaagattattatttacagacttttcttcatagtctctccggttttccttcatgctggtctccttctgtttattcccggtaaatctgtgcaaaccggaaatttctgatgaataacatggtgcagaatcgttttcgattattatattttactgtgagattgtgatattagcaatagtgaaatggggcagagaagagttgaaaaggcagacggataaaaaacaaagataaaatagtaaaaatagaataaacaaagaaagaatatggaagataaaacagaaaggaataaacaatgaatgtaaatcctataacaagattggattatccagatctggacgtaatccgcgtagaagacacctattatatggtatccacaaccatgcactttatgccgggctgtgagattctgcagtcttttgatctggtgcactggtagcatgtgacttatgtctatgagacgttggatcatacggatgcgcagcaactgaaaagcggtcagaatatttacggacagggcatgtgggcagcttccctgcgctatcatgaaggccgattttatatctgctttgtggcaaatgatacccgtaagacttatttgtatacttcggaaaaaatagatggtccatggaaaaagcagctgatagaaggcttttatcatgacggctctttattatttgatgaggatggcagaaactatattgtatatggaaatgatgaaatctggattacagaattgaatgaagatttgacggcaccaaagaaggacggattacatcgtcttttagtcagtgatcataagaacccggagctaggctatgagggttctcatattcaaaaaataaacggctattattatatttttctggttcattccctgagagaccgctggatgcggacggaagcatgcttttacagtgattctctggaaggagaattcacgggtggagatgtactttgtgatgatcgtggatattgtggacagggcgtggcacagggaggaatagtggatacgccggatggaaagtggtatgcaatgctgtttcaggattccggagcagttggacggattcctattctgcttccggttacctggaagaatcattttccgttttttggacagaacggacatgtgccggaagaaatagaggttcacagtaccagaccaggatatatttatcagccattagtgggaagtgatgatttctgtaatgggctgcttccgcgctggcagtttaatcatgatccagatccacggtactatcatctggatgcattgcagggaacctatacaattacaacacgggaagtttgtacagagcttacacaggcagtaaatacgcttacgcaaaggatgagttatccgtcctgcgcagctgaggttactgttgatgcttctgcattgaaagagggcgatgtcgcaggtttatgtgcgttgcagagctgttatgctgcagttggcattacaaaacatcatggaaaatatgaagtccttatgctggataaaaaagaagatggtatattggatatgacggaaggaactgttgttgaatcacaccagatggattttcgtcttgaagcagatttctgtaacatgaaggatgaagcacgctgctattaccgggtaaataagggagactggctacccatcggaaccgtgcataagctgtacttcaaactggatcattttactggttgccggtttggtctgttctgctatgcggcagaggaaacaggaggaagtgcctgcttccgggattttaagtattatgatgttgatgaaatctcataaagatagaactgcataaaataagtgtcggaatttactcaaatttttcctactttgaacattggtttttacaacggtattgtatagtgaagcagaggaaaaacaaaacatgtttcagagaggagaaacgattatgagaattaagagtatgatgaagggtatgcttgctgttgtaatggcaatgtctatggcagcatgctccggagcacctgcagcataccagacttcttctgagtcaccgtcaccggcacagacagaaagtacagcagcaacagagcaggaaacaatcgtaacagaagtatctgcagaaacgcagacgcaagaagaaacagcaaaagcaccgaaatatgttttctgtttattggtgatggtatgagctatccccagtttcaggcagcatctgactatcttggagcaatagcagatgaagattatgtcaaggcacttccgagcaatagctatgaagaccgtggaggagcagtactggacggaccggaagcaggatacaaggttacctatacacaggctgatgcagaagcggttacggctgaagatggaagggttattctgatggatgagcatctgggtactgattaagaatggcctgtgccaattgtctgttcggagcaacatctttttttcttcttgtcatagtgagtgtgttcatccttttttatcctttcctgttatcttaacacactctgtgaaatgaacaaagtgcgtaagttttaaaatttgattttttcaacttacacactttattttacaccctccctttgacggattttctgtttacaatgattaaccgaagggggattactttgagtctggaattacggaattatatgaaaacgaggaaaacctcattttaacttgtactaaatcttgacataggaccaacaggaagcatagaacttttcttccccaaatatcagaaattgcacctacccattcttttatattttgtattgcttccgtttttagatgtcctcataaaattaaaattttatgtcactttccagacctctaaaatcccttaaaataaggcttttctccacttttcaattcctagaaaactactgccggataagaaaaaagaccctgacagtctggaaattccagaccatcaaggtcattctttattctaaattgcttttcatgttttcacatgatttttttcatttcactggctgaaacttttgccctaaaactggataaaagcctttgccctgtgatattcaagctactcaaactcggcgtgttctttgttgttattaactatattagtttaagttttatgcaaatacacaccgttttttacttcaattacatcatttattctggcttactgattttctgttgccaaaatgttgccatacagacaattacaatttttatactacttgttattttttagcatttcctctctatggctgtcatatatagcatacataaaattttctaaatcatcaagaattttcttttcaaccaatgtaatctttgtaccacgctcataaattttatatgcgtctattatcaccttgttattcattaactttccaaaataatttaaagtagaattcattggtactaaatccaaagaaccatgcatcatttttaatgacggtatatatgtaccgaacacatgctcaagaaactcctctttttttaatttgccactaagcattcttgtcccatactcctttaaagtctttatttcagacattcttaccatgttatccataacactaattgttccgtcgtctggcacataatctgccggtattgaaaaagaagtatctaatatggctgtactctgtgcatatgcaaccatatccggtggaaatatcgttatactatttagtatttgagtcaaaatcaaatagaataaaagcagtgcatcatttgcgttattaaatattccgtatactgtattttcatctggtaataatgatacatttgtcagtccatttttattcactggtaaaataacccctttatttaacacgcatatacaacttatccttttatcaacctctacatcctccgacaattcattgagatttttatataccgcttctagagaagcatcggaatcatacgcaaataccatccccgctgtcggaaaagagtagcctgaagttgtctttttctcaagttttctcacactctcaatatttttaacacacttcctcaattcttctttggtcaacgtcgatttaacttcaacaaccccataaacactttcaatcggcacaattttagtaccatccatatctacgaggtatggtgtcaaaaatttatcatgtataattatatccacctgtctactttgtacatccttacaatctacaatcgtacctttcgaaaaacaatatttttcaggtatataacatttcaaatactcttcaagtatattttcccttgccgttcctttttctccattatgctgtattttactcgttattccctcaaaatcaatttgcatttttttagacactgacattaatatatctttaagcataacatcccccatatcttacagtttgtttgatcaacccacatatataataaatttttttaatcttttatctataaatatccgaaaatcctccacaaatctataaagaaacttcatccaatatcctacgaattttcagcatatgtcttcttgtttttctgtctataggttcattttctccaaaaactttttgagcacgctgaacatacgatatgaaatttcctttaatatgtccatttgaatcttttaaatgcgcccctttaacagtatacttctcatataaatttttacagcttattctttttcccgaaggagtatagccttcatttttcactatagttttaagtttccgatataatctgtaataatatttcgaaatagttttatccctaattgttatctctttaccgtcaaatgtaaatcctaaataatcaatctcattttttccatttaacacatcctttaaaaacaatgcattacaactgtgcgacttgttcgccgctgaaaaggtggcgcacagcgctgtttcaatcagttctgtgaactgataattcgagaggtggaatgaaggagtaacgccctgaaacgcctcccctgatactccggcatgcagaggccaaactctgtgtgaagcccggtaaagccggcagagagatgccgtaacaggttaagctgacgaaagctgtccagaggtggacggtgcatcctatatgccgggggtctataagatacccatggtgagaatgacagagatgtctgacgaaactcccgaatgtaaaggtctaaaagtgccacgctcagaaatgggcgtgtgggttaaagcccaggcagtacggtttagtagaaatggttgttacgaaacaccgtggcacgttataggcgtgtccaagctgtcaggcccagagggaacacctaaaggtatgtatgtacagataggattatcggaacaaggaaaggcaggaagtctactggataatccggcgaagaataataagcggatgaattcctgctgaaaagcagtggtcgaaccgatgatatcgtctgcgaaaaagaggacggttaggaatggccacaagtcaggcaaaacgtcagcagtacacaaccactattcatgcagtcgagtaagaaaaagaaattgtcgctcggtttcatagaaatggggtgatgtacatggcacaaaaagctaagaagaaaagcaagctacgccatgcggaatactatgacatgcagaaaacctttgacagtctgtatgcagacagcaaaagcggtgaagtctttgggcatctgatggatatcatcagcgcccccaacaacatcaagctggcatttagaaatatcaaaggcaatgatggcagtcataccgcaggcacggatgggcggacaatagaatcattggcagtcatgtcagaggataagtttgtaaagctcatccagaaacagttcaggaggtatgaaccaaaagcagtaaaaagagtagaaataccaaagccaaacggaaagatgaggcctctgggaataccgtgtattattgaccgaatagtacagcaatgtattttgcaggtcatggagccaatctgtgaagcaaagttctatgagcactcttatgggttcagaccgtgtcggagcgcagaaaatgcgatttcctatgcgtatggactcgcccaaaggaacaagcttcactatgtagtcgatgtggatgttaaaggattcttcgataacgtcgaccacagaaagctgctgaaacagatctggactttaggtatacgggacaccaagttgattcagatcatcaaggccatgctgaaagcgccaatcgaaatgcctgatggggaaaccgtcctcccatccaagggaacgccgcaaggtggtatcctttcaccattgctggcaaacattgtcctcaatgaactggactggtggattgcctctcagtgggatgaaatggtgaggcacatgaaacatccgtgtaaagtgacctactatcccaacggcgcagagaaaaagtgcaacagctatacagccttgaagaaaagcaacctcaaggagatgcggattgtccgttatgcggatgatttcaagatattttgcagaaccaaagaggatgcagagaaaacctattatgcagtcaaagactggctatggaaacggctaaaactggaagtgtctgatgaaaagtcaaaagtgactaatctcagaaagcgtgatagtgagtttctgggttttcgcataaaactgcggcgcaaaagtaactcatgggtgataacttcaaatgtctgcgataaagccatacacagaatcggcaaggaaatggctgacagtgtcaaggcaatacaaagcagtaagacggctgaagaaataagcctgaatgtggggaactataatgccaaggttatcggagtgcaggactattactgcattgcgacaagggtcaacttgaatttcagcgatatcgcccgtccaatcaatggacagcttctccatcgtattgacggaatcaagaagcagggcgagatcaaaaacagatatctgaggaaacgatacggaaaatcgaagcaaatgcgatggattggagaaacgccactggttccattagcttacgtgcaattcaagattccaatgaggaaaagccgaaaaatcaatccgtatacgcccgaaggtagagcagagatacacgataatctcaggattgacgtaaattcaatgctctggctgatgaggcatccgataccgaccgaatcagtgagatacaacgacaaccgggtctccctctatgcagggcaagacggtaaatgtgcaatcaccgggaagaaactggatgttcaaacctgtatctgttacaggaaaacaaacaattgtaagaagggcaatgacagctaccagaacctgttgcttctttctttgcagggattggcaatagtcagctcggaagacatgatgtctgtagtggcgttggtgaaggaatactctctgaatgccaaggttattaccaaagtgaacaaactgcgtgctaccgcaggactgccgctactggcggcaaagtagcaaacttagccaatgtgaaagagtgattgtgtatcactgctgaaactatgcttgatggaacgccggatgcggtgaaagtcgcatgtccggtgtgaagtgggggaaaacccggagataatttcaaagggttacctatcactatttttaatgttgtatctctatatttatatatttgtgttttatctggttgtaaaattaaatttggaatttgtttaatttcatctattatactattcaatatctccctaaaatcatcttctgatattccaggcagaataataataaaatcatcactatatcgcatatacagacccttgtatttgttcgctaaattatacatttgctcatctactactatcatatatacatttgctaataccgcactaattgccgacccttgtggtatcccatagttttctttatgtctaataataaattctttcttatgcttttttaaatctttttcagataaaactttacgtttagaatttaaaatttgtatatcttcttctgtgtctgttaaattatttagtttaagtaactctgttaattcccaaatcgaatattttgttatatttttaaatactgcgtaaaaatccgatgacaacatatcaacttttaaaacatcacacattcgttttttcaaatagccatgatctaaagaatcaaaaaaatgagaaaaatctcctattattacaaaactttctttcgtttctctaatacaatcaaaagctctttttgcgaaatgaatattatttttgtgcaaattatctctatatgcaaccgcaaccaaattcatattacgttcttctaagtatttattatatttttgattcaaaagatacccataataagaatatatatatctatcaatatgtgcagaataacataagtgcctagatttttcttttatataacctcttccgtctttcctagtaaatttattaaatttcttttcataatgtataaaaggataaaatccatgtttcacaatgttagtcggatcactgatataatcccaaactttgtccaatgaaaccttttcatcaaaatgcgcatattttcttgcatttgcatttttcgttttccattcgtataaatccatacactcttcctatttagcgaaagacctaccagcatgagggatagcatctcttgactgataggtcttctttcaacatggtattcaattttgtctttcgacagctttgatgtggtgccagctatccattattcgttcaatacatatctatgttagaatagataagaaggagatgattctaattaacattcttatgtggttattcataagtttgcaaccagaacaccagtcatatctgaaagagctctttcaggtattgacaacaattcctttcccttatatctcatatataaggcactttaaatataactcataactacccctatgtcaatatataccagtcatttatctccctcaaaacactcttgaagtataacgcaatataatcctttgagaaacaaggtttccaatgttcctaaaacacaacaagcacagccatttatttcagaatctccaaagccatttctttagctttatttccagaaatctgatctctatgttcactatcatttaaatatatagcaatgtatttccgttctccatctgattcagaaaaaccaacaaaccatgcctctccattcccacttcctgtttttccataaattttctgggaatcgttttcatccactaacattattcttttcaaaatttctatatttctgctatcgtaatcactatgtccctcaaatatcctactcaaaacttctacttgttccaacggcgaaattttcaacgaagaatctaaccaaaaaccatttagattttccaaaggattgatattgctaccattccactccgaaatatcgcaattcccgtactgtaaattctttaattcttcctgcattttatccctaccaactaaatctatcacttctcgaaaataccatatacatgatttctcaaatgcttcttctaatgttaaatccccattccattctgcatttccataatccgttccgtcataccccattgtcgacgattcatcaacaataacacctttttgtaatcctaataaagctgaaataatcttaaaagtagaatagggcgatacttcttgccgacacatatcttcattaaaaaatgaatattcctcttgtactggcgaataaatcaccgcacagccattaatctcctgaaatgccccgcctaaatcaatcttctttttacttatcccttgttgtatttcttcctgttccgctttctctccatcaactttcttaaaatttacaccaccttttgtattttctcctataactgtaatcttatatgttccactctcttgaatttcaacatcaaaattttcagaggttactatatcatctctttcataaatcggggtatcactatctttttgaatttttatcgacaattttccactgtcaactataacttccgtcctaatagtatctcccgattctaagagcaatgattgctcatccgtagtattaaaaattttgtacttcataacaaactggctatcattccctgttctgctaccatcaaatgacgattttccgcatccactcaataaaaatacaataaaaaaaacacatattatacttaaagaccgtttcatattgtcctcctatatctagtcataaagtaattgttttcattatatctcccagtcatttcactgtaaagcaaaaccagcaaatccctatcagtccatcaagagtaaactttatagctacacttttctcgactaactgacgaggattcacttcatgacagttaagagggctttaagcagccctctttcaatcaccgaacttctctactgtgttttctccttacagcccgtttctgttcagcttctatctgttcctgttgctttgcccggtcaataactgcatttacctgttcagcccccataactgttcttacacgaccaaaatccgttgcaatcgtccgaagttcccgattttcccctaaaaattcttctaatcggttctttaacctttcatttctgtcttgctctctgttatatgcatcttgcagtttttcaaatcggttagaaacactcaaatattcccgatacacagctcgcagaactgttatgattttcccaatcagtggttttgcttttttctctctataagactttccgctttccaatgttcctgcttccggcagcacttcctctggatcatacgaatacttaactgcaaatcgttccatatcctttaccataggagcaatctccgccagttttttctcatatcgtgctgcttctttcttagccacttctacttttttatctgcttcctcacgaatttcctgtgcggagtgaatctcctgttcaagattttccaattctcccaaccacttttcactggtttccagtatggcaacattatgttcttccagactttcttttttcgcttccaactccgcaacttcctttgcccgttcctttttcttaaagtccaaaactgataaatgcttttcatgtgtacctttctgttcccattcaatcccacgttccaacataatttccgcaagctgttttttctcatgctgtacccattgatttaattctgtttcgcttctggtgcctcctttaaacccaagagccgataacgcctgtttcaaagaaactcttgtatcgagtcctcttttgcttcctgtcgtatatggtacaaaatcaatatgtagatgcggtgtcgcttcatccatgtgcaagtacgcagaaaatacccgtagcgtaggattccttctttgaaaatcacgcatatattcatcaagcacctttgcagcaagctgtccgttttctgttgtcgctcccatattgtctttatctccaatttgcagaatgatttcatggaacggtttctcctgtttgccgaaacaaattttatcataataatcatcaatcttacggtcacttctggtctgcttctcgttgtatcgaacaagagcttcatcaaacaattcgtgatacacgtctttgacatcttcgttacagtattctacattcagataacttctttccgaatctatattttttgcatggaattttctgctgttatgattaacagaaccttttcctgtcataaaactaattgttcgcttcaatctttatcccttctccctgtttaggggtaatcagtgccggatacggcacatagctttgttactttcgtcgaaagtaacgcaaaagcacttttgacagccgttccgtccatcaaaagctgccattgcgccctgccgggagcttttctgtcctacggacgggcggctttcagccgctttgcttctgccaccatagcttttcggatagctgaaagcatattttctatcgtatattcatcccatccggcaagccatatcagtatccgctgttcatcttctgtcagctctacctctccgaaaatttcattgaggtcagcaatcctcctggcttcactttcgtaaaaatacttattcacgttccgagttccccattccggctgaattatcatccaatcacacctttctctttgtctgctatcacaggggtgtgacacgcccctgtctattctcatcaagaaacactaccagcggaaactgtccagcactccacgtctatccagatattcctgtctggctttttcccgttcctcctgtgttggagcagtcttaaatttcccatatagttcatgctgcaccaaagaatccagtttcttctctaatccctgccggatttcatccaaacaagtatcatcctccaccagatagtgacggatcagcaacataaacaattcataaggaatctgtacattcttcatcttctctccctttctgcgtcggtttgcgtcgatagcgtcgatattttccacaccagcctgctatcaaaaataccgtcgcaaccgacgcatatcgtcgcttttattcttttacttcaaggcgtttcagaatgatttttctttcatgcccccgcttattatcatagaaaatcccatagtcattgagcagctggctattgacagtattcagccttctggaaagcacattcgcctgtatctgtatatccggcagttgctttacaagttctgtcgctgttccctcccacgcctgtctgtcctctgtcagaaacacattgattgcttctaaaagagggttcggtggctgtttccacaactctgtttctgctttcttgaatttccatacacaacgctccctgtcaaattctatagtcagttcctgatccggctggtcacgccccacaatatccatcactgcttcattgtctgtccgtttctttttgtgcatgataaacgccccatctgccgcacccaacagtccatttgtgccggaaatcatatcaaagctgtcctccgattccagcttgcgtgtatgatgaaccaccagcaggcagataccatatttatcgctgaatgatttcagctttgtcacaatctcataatcgctggaatagctgtatctatccccgccaacttcacgcactttctggagcgtatcaataataatcagccttgcgtccttatgctctttcaaaaatccttctaattgcctgtccaacccctcattcaaagtctttgcctgtgttgcaaaatacagattatcggcacactctacaccaaacataccagacagtcggcgttgaagtcttgcataatcatcttccaatgccagatacagcactgttcctttccgcaccggataatcccacaacggaatccccattgccacatgataggcaagctgtgccatgaagaatgattttcctacctttggcgcgcctacaaatagatatgtgccaccatagagaaaaccgtctacaatcggtactctcggcacaaaaacagtatcatacaattccggcatggacatggtatgcagtccgccattcccggatttctctgggtttttggtggcttgctgattgatttgttcctgtgaatttgctataatttcattgtgattttttacattcggctgcaccccatctgcgccaacagatgatacgggagcagtcgttttcattttttccatcattcatcttctcctttcaatccctctaacgtaattgcaattacctgcaacgtatagagcagttcatcattatccgggcttactgtttccagacgctttaactcctcatgaatagctgccatctgattttttaatgccttataaactctcggatttccctgtacaaccacatccctgcacgtcagtcgtcttatgatatattcctgctttgtcaaaccagacaatgctaccaaatcattaagcagcttcgcttcttcatccgatacccgaaatgctacggtatgatttctccaacgccctttataatcaagacttctttccattgctgttctccttttccattcgctccatttccagcttttctgccatttctgtctgaacagttggaaataaatgtgcatacctgtaagtgattttttctgcttcgtgtcctacccgttcaccaatcgccagcactgaaaatcccatatttatcagcagcgatacatggctatgccgaatatcatgcacccgaatctttttcactcccgcttgttttgcacctcgctccatctcatggttgagataagattttgtaactgtaaacagccgttcatctggcttgatgtcatagaacattttgatatactcctgcatttcttcgcagagaaacgggggcatttttacggtacggttgcttttcgctgttttagggcttgtaataatatcacgccctttggaacggtggtacgtcttgctgatcgtgaccgtctgcttctggaaatcaaaatcagcagcagtaagagccaacagctcaccggaacggataccgcaccagtaaagcatttcaaaagcataaaaggaacgtggcttatccatcatggcttctgaaaatttcagatattcctcttttgtccagaagtccatctcctttggaatttcatttcccattgtgccagcccgtcttgccggattgtaaggcagattataaaagtttacagcatggttaaaaattgctgtaagctgtgcgtgtattgtcttcagataatctgctgaataggacttacctttctcatcctgatacgccatgagttcattctgccatgcaataatgtcttttgcttcaatctctgcaatcttccgatttccaaaataaggtaaaatctttgtgcgtattacatggcttttagattcccatgtactttccttgacacgctgctttttatctgcttcataaagttcaaaaaagctggcaaatgtcatatccagtttggagttctgtttcaacataacctcatgttcccaagcttgtgcttctctttttgttgcaaacccacgtttctgtgtctgtttccgttcccctttccaattcgtgaaacgataaattaccctccacgttcccgtagcattgtctttatatacagccatttccatcatctccttccaacttaatcactgtaacagaccttcttatgaaagaaagtagtatttacacgccccgctactgtcatatacccttgtttctgcaattctgtgttcaattcccttacaacctgataggctttggactttgatacccttaattctgttgccacttcttccaccgtcataaatgatttttctgccatctatatcctctcctttccctaaaattcctgccgttctctccttcccgttctgacaggcaacccttttcggcgctgtgccagtccctctacacaagggacgctcgcttcttttttaaaggtcatggcgtttgttcggtttggacggtcattcaatttttaactctttttgtttaagttatgtttttatgatactaaataaattccgttaagtcaagtggtttgcagaaaaatcttaactttttttatttaagttccgcttgctattcctatttcatcatgttatactaacttcaacagaaatgtttagtatcggaggttttattatggcaatcggcaaaagaatccgcttttttcgcaaccggaaaggcatgacacagaaacagttaggcgaactcctcggttttctaggaaagacctctgatgtccgtatggcacaatacgaatcagaatccagaacaccgaaacaagaccttgtaaaagaaatggcacatctcctcgatgtaagtcctcgtgcaatcactgtgccggaaatagacagttatatcggacttatgcacacgctttttgcgttggaagatatgtatggcttaaaaatcggagaaattgacggagaagtgtgtctgcggttagataaatctgccggaacaacctacaccactatgtttgatatgttccatgcatggcaggaacaggctgtccgtctggaacaaggcgagataaccgcagaagaatacgaccagtggcggtacaaatatcctgaattagacacctcaaaacaatggagaaaggtcattccctcacaagaactcagcgaccttatcttacaggacttgaaacccgaatccaactaattttcaacctcgaaacgaacaaaaaccttaccgactttcagctttatttctgaaaatcagtaaggttttctgttattgaagtattctattatttagtgagtgatactctaaatgttgccaaatcgttgccactacttaaacaaattcgcttgcaacccgcataaatactaggttcttaaagtccatttcatcactcgaactctatcgttgccaccggcttcggtgtaatctcatagcatactctgctgacgcttggaacctctgctgtaattctggcgcagattctttccagaatatcataatcgattctttcaatggatgcagtcatggcatcaatggtattgacagctctgatcacaaccatgtaacccatgcttcttgcgttgtctcttacaccaacggccttgaaatccggcactacagtaaaatactgccatactttcttatccagtcctgttttggcaaattcttcgcgaagaatcgcatcagattcacgcagtgcttccagacggtcacgggtaattgcaccaagacatcttacgccaagtcccggtcccgggaacggctgacggtaaaccatttctaccggaagtccaagttccagaccgcaggcacgaacttcatctttgaacagctgtgccagaggctctaccagctcaaactgaagatcttccggaagtcctcctacattgtgatgagattttacgcatttagctgtctttgttccgctctcgatgatatccggataaatagttccctgtccaaggaattcgattccttccagctttcttgcttcttcttcaaatacgcggataaattctccaccgatgatttttcttttttcctcaggatctgcaacattttccagttttccaaggaaacgttctgatgcatctacatagacaagatttgcgtgaagctgatcacgaaatacctgaacaacactttctgactcgtttttacgcatcagtccatggtttacatgaacgcatacaagctgctgaccgatagcttttatcagaagggctgcaacaactgaagaatctacgcctcctgacaaagccagaagaacttttttatcgcccacctgtctgcggatcagctctacctgatcttcgataaagttcttcatgttccagttcggctctgccttacaggtttcaaaaacaaattttttcagcgtatcctgatccggaagcttatcaaacttcacatcgcactgggactccggataatctacagaaatcataggatatcccagatcataaagctccggacggatcactaccggctttccatctacaattctgttctcgccaccattgagaataattccttttacattatcaagagctttcagctcgtccggggtaatatcatggggatgaatctcgctgtatacaccaaggctgcggatatcacgggcaattaccgtattttcggtacttcccaggtcaagaattacaatcatgtcctgtttcataataaacttctcctttgtttttatgataataactgctgcttctattataacgtctttcctcagaaaaatcattataaatccaaaataaaacacgcaatgtatgaaaaggattttattttctatgttttgcacaaaatcacaacgagaattcagtatcaggaacttcttctataggatgtctggcaacgatttccagaccctgtatcaacatttgatactagtatggaataaattaaatttctgctatatatttcaaggataatgtgtggtcaaatagtgttatctaagaaaggatgaacactatgagaaaaacatatcttcctctgtcaaatgaagccagagatttgtgaaaaattattatacaaaaagagaaccattcaggcgcaagttgtggatcatgccagaatccttttatataaagccgatggaatgacattccagcaaattgctgataaacttgcaatcagtaccgcaacggtacgcctttgtgtttcaaagtttcagaaaggcggtttagatgctgcgctgtttgatgttcagcgtcctggacatccgttggaaattaccgatgatgcgaaagcatggatgatccatattgcttgtcagaggccgacagcactcggttatgcacaggaactgtggatgttgacctctctccacaaatacattcagaaacatgcagaagaagcgggatatcccaggcttttaacagttaccaaaccgtatatccagaaatttcttaaggaacaggatatgaaaccctttaaaatcgaatattactacgaaaaacgggatcctgattttgaatcaaaaatgcatgagattctgttggtttataagcagattaaaatgcagtttaataaaaatggtgttctcattattccagacgattataaactgacgattgcggtatcgtataatgagaattcggacattcagacaatctccaatacggcaccggatttacgcccaacctcagaacatggggaagtatatcgtgatgcagaatacaaacgtctgggaacgctctctttactggctggcattgatttactcactggagaagcaaatccgttagtaaatgagacccctaatcattctgattttattgagtttttaaaaatactggacaaaaaatatccatcacaggataccattcggatcatcctagataatcattctacacatacttccaaagaaacacggcgctttctggatactatgccaaagggatgttttaaattcgtgtttacaccaaagcatggctcatggttaaacgtgattaaaagcttcttcagcaaaatgaccagacagatgcttcgaggaattcgtgtcaataccaaacaggcttgagtttccgcagttttatccacagtcacctgttttgtaatatatcattataaacaacttttaaaaaatgcctaaaatataaggaatcttctccctttttgatgtaaaattaagctaccaaccaaaaatcttactaaacaaaaagaaaggggattccttatgtctcattttacatcaaacacttacattttgaaacgaaaaattttaacttttacaaagaaattttcaagaaaactttcaaagcctgaaagaaaatttacagctgacattacctatggtatgctggcttccggaagttgcctgttaacggatgtctgtgatcagcttcacgaaccttccaaaaagataaacgttgttgatcgtttatctagacaccttgaaaaaggtgtgtctgcatccgctgcttccgcttacctacaacaagttaaaaaatggagttcttctgaacctatcatttacattgatgacagtgatgttgttaagccggatggctataaatttgaatcacttggaattgtccgcgatggttcagaaagtacatccactaaaagcgtttataaaaaaggttatcatgtaaccgaggcttgcattcttacttccgccaatcatcctgttagtattttttctaaaatacattcgtctcatgaaaaagactataaatctgcaaatacaattactttccaagcaattgaacagggaaactctctctttggcaaagccacttttgtcatggacagaggctacgatgacaataagatgtttctgaagttggatgaactcggacaagattatgtgatccgtttaaagtctaatcgtaagcttttgtaccataacaaatggacaaaggctacagaacttcgtaatcgcaggaaagggaaggtgaaaacaaatgttttttacaagggcaaaaaccatgaagcctacctttcacatgtcaaagtacagattactgcatccagaaaggacatttttcttgtgcttgtttacggcattaccgaacatccgatgatgcttgttactaataaagaaatcaaatcgaaagatgatataatccgggtggcaaggacttacttttcccgctggaaaatcgaagaatatttccgctgtaaaaagcagatgttccagttcgagaactttcgtgtgcgtaagctgaaggcaatcaacgcgcttaatttttatatcaccttatgcatggcatttcttgcaatgatttcaatggaatcagagaccaatgcccttaaggtttccatcataaaggcagcaaatcctgtaaaggaaaaagtttttttctgctattaccggctggcaaaaggcatctcaggcatactttcttatgcaaaagagggcgtcaggctttggttccggacaaaacgtccggcataccgtcaactctgccttaagctagccgcttaaatagataaaagaatagttctcccaaaagtccggttctgacagggcttattaaagtgtctctattcacggaactgcctttcttaaaatttcaaaaatcggcagattgacactttaggagattctattcattttgaaattacattttgcggaaactcaagcaaacaggagttggaactgaaagcgtatgattctggctaaaccgtcaattcctctgcgcaaacctgtaaatccacattccagatacatttttttaatccagtgccatcattgagcattgcggagcactcccaaaagtgtttgcaaaagtgaatcagatgcctgctcggcgctttccagagtgaggttgtttccgcttctgatcaaggtagcgattttatactccgatgccatattaccggatggattgcagaagagggaacttctacaaatgtttgcatatgattcacagtttccaggtaaacctcatagactttccggagtctccagtaataactcgcctttgtaatgtcgtggagctgacaccatttatcgattttcattccttgcggacggttttgacagtctctgatcaaatcagcccattcactcaaacaagtttgctgtgcaactaaacttgtgtgggatttcatgactcatcggatgattttgaaagggtactcgctattttgccagagatttcgcttttaaccccccattttgccggatgtattcttggtaaaatggggaattctgtttctaaaaaaagctgatgcggtaagggatctgctgtcaagaataaatccggaagaaatcctcaggatgtatgaggaaacagttgatacaatgaaacgcaacagggtattccgggaagggacaatagaaggatatgttatagcagtgatagacggtatgaaattattcagcagtacaaagaaaaatgtcctgagtgcctgatccggaaaaaccagtcaggacagacagaatgatttcaccgggacatggtatgcatgacgataggaaaggctccgcatgtgatactgggggcaggaaatgttaaagtcaaagggtggatccgggaaagataagggggaaagcgtctgatcgaacggctaaggaaaaggcatggacatttcgcggatgtagtagtgacagatgccttatatttgaatgcgccctttatcaacacacttaaggaaaatagactggaaagggtgatccgtttaaaggatgagagacggcggctgttccaggatgcggaagggctgtttaaccgttgggaggtgagaaagaaattattccaataagggaaaaaaggcagaggtatgggatctgcctggttttgagatacccagctgcccgtacagtctgtgagaagcacgttaccatgaaacataggaggaaacgagagggaataaggagaggtgaatgtagctggtaacggcactggaggaggcgagatatgaaacgctatgggaaatgatgaaccacatatggaacatagaggagaatggtttccaccagttaaaaacatattaccatgcgaagcattgttactgtcatggagcgtcagaagcgatatgtagcatgttgatcctagattttaatatgaaggaattatatctgtaccggagactacagggatttataaaaagtaggatcagccgaaaaagcgtaagccagattttttgtgatgacctacagacagagaaggtaaagtatatcctgcatggagaaagcggatagggactggagatgataagaaaccttgagaacaggataattaaaaaaatccataatagatgcgatagaggcagtttgtgcgtattctttcgcatggaaagagaaaaggcggaaagctgtagaaaaagagggattttataaatatacagagttaaaagccaagtccctgctattttacgtttactcttgaacagactaaagctgtaccataaaaggactgtcctaccggacagccccttcgcttatctgtttcgttttattacacgagacgtcttacagaaagaatagttctgtaggtagcgtcattactgatcttaatgccatcttttgcattggatgcatgtacgatttttccatcgcccatgtaaatagcaacatgaccgccatagcaaatcaggtcgcctggctgcgcatctgcataggaaacctctgtacctgcattctgctgctcataggaagttctcggaaggcttacaccaaagtttgcatatacactctgtacaaatccggagcagtctgcaccgtcagtaaggcttgtacctccccatacatatgggtttcctacaaactgtgtagcaaaatcaactactgaagagccggagcctgaaccagaactctgatattcctccggatctactgtattatcactgtcaatcacatttccgtactcatcgtattcaacgtctccgtcactttcctcttcgtctgtaacggaatcaggatcaatttcatttccctcttcatcataaagagtttcgccattttccagagcatcttcagcgtctacttcattgccctcttcgtcataaacagtctcatcctctgcttcagcttcctgacgtgccgcttcctctgctgctgcaagctctgcctgacgtcttgcctcttcctcggctgcgattctctcagcctcaagcctttcaatctctgcctgctgctgttcgatcagagctgcatactcatttgccatctgctgagcatatgcaatctcattatcacagtctgcagaaactgctcttctctcatcaattgcagcctgaaggtttacagattcagcttcatactcctgcttcatcccctccagctctgctttttcctgctggtatttatttccaagctgtgttacctgatcgattgtatttgcatacttttcaaggctctgtctgtcatagtcatacatcttctgtgtatactcagccttggtaagaagttcggaaaggttctctgcatttaccatcatctggaaccatgcgtcatttccgcctttctcataaagatactggatacgctgtttcatagcttcatactgtttatcttttgcattctgagctttctgaagatctgactgtgtctgctcgatatcggcctgcttattgctgatatccccttccagagtctgaatggagaccatgacatttacaagattcgcgtccagtgcagcgatttcgttctgaagctgttccttggctgcataaagctgatcgatctgagaatatgtagcatcaagctgtgcgcttgtccaagcctgctcctctctcagttcttcctctctggaagcgcttacagtagcaacctgtgtacccatcatcataactgctaacatcagacatacaattcgttttttcatgtttctcacctcttatataaacacgttttgtaacatttgcgaaatatttttcttaagctcttttacatattaacatatgattttattgattgcaagaggaaatcaagaattagtttaatattttgtaacatttattaatgattacgaaatacactattgaatttctctagaaaaaagtatcttcgacatttcaacctccctggctctcattcataatggggtaaaagcctatttttgttacttttttcataataatcctatgaacatcttaccccaaatttttactgactattttgagaaaatgaaatatactttgaatcccaaatcatccgaactataaaaaatcaaaaagataatcaattgcgggggccttcctttggcgattctaggtgcagctgatgtggcataaaaaagttaacagctactacaatatatttatggttaatattccttacagccagtaaggaattacccaccttgttacttaagctgttaaaatgataagagcaatcggtatatcagatacccccttggactttgcgtccgtaaataagtctgctaaccaactcttcattcgcagcgttcgttttatgcagattgaaccgccttccgggtacgttcgtggcgcaccacagcagatagaatgggcaatgattaaaactggtattgaacaattgcaatctcaatcaaggagtaatatttttatgaatatgaacgcagtagggtattgatgtctccaaacgcaaaagcactgtagtgctcctccttcctggtggaacggttgtttcaaaactctttgatgttccccgcttgtccgctgatttccaatctcttaagaaacttatcagagaactggatggtgaaactcgcattgtcatggagtgtagcggccgctactatgaaccggtagcacgagaactgtcccgggacagcttttttgtaagcactgtgaaccctcagatcatccattactttcagggacaagacaatcctctccgttaaagtcaagaccgataaagcagattctataaagcttgcacactacacgcttgacagttggacgaatctgaaacaatataatcttatggattaattacgttcccaactcaaaaccatgaaccgccagtttgatttctgcatagtggtgcagccgcaggaagtacaacttcagcaagtcaaacgccgaagaaatctatggaaaatcaaaggaacttatttctttacttccaaagaacaactttaccaaacgcatcatcaaacaacaatctaccaattaaacacggcgtgacagaccgttgaacagcatcgcacccttatgaatgaaccccctccaagctgccggaatatccagttgccatggcgatgaaggacgtaggaccgtctctgggtcctcagcttatggacaagatcggagatgtcatacgttttatccacaaagacgctatcacggcatttgccggcgcggatcccggtgtcaacgattctggcgattattcccaaaaaagcgtacatacttccaaacacagttcgaccgtgctgagaaaaactctcttccagatcatgaatatactgattaaaatcaaaccgaacgatgccgtatatctgttcatggataaaaaacgctccgaaggcaagccgtattatgtctatatgactgccggagttaataaatttttacgaatctactatggtcggatgaaaaaatatctttcatcacttccagaatctgaataattccacaacactttttcagaccagcgcagatgtagtggtctgattatgatacctattttttaacctgtataaaattttcaatgttcatcaatttagccttgactttttatttgcaggcttgttctcttgattttattatgaaatccttgagaacaaactgtcaacttttttataccacatcactataagtgttttgcactctccatctgcatggcgattgcggagggtcctcctccatctcacaaagagcattgccatttactttataaaaagtaggggcattcaggacacactgtgtgacaaatcattgattttctttgccataaaatcaccttttctttcttaatagtggatggacacctctattacaatggggaaaggtgatttttgtgtataacgatgccccacataaatcaggtggattatagttcaaaacacctgcacaatgcgcagatgttttgaacaggctaaagccgtacaaaaaacagcccgcatatattctactatatacacgggctgttcatattattttttatttcttataaagataactgctgtattcgggatcctccagattcgatgcatctatccacgccggttccagaaaaacagttccctctgcttctctgttctccgggtctgttactttagctgccgccaatatggtctggtatcccatctcatatggatcctgggaaacaattccgtattcccgtccatccttcactgcctgctgctgctttgtggttgcatccacaccgatcatcaccggcagatcttcctctgtctgatccagagcaagatataattctgacacgtccgcatttgtacagtatactcctgccgtatccggattctgcgccagagcctcctgcatggctgcgctcatatcttctacctgatctgcatagacttcctgtacaacttccatatctgtatattctgcaatggcagttttaaatccactgacacgcttctggctgctttctgtcttttcctgagcagaaaaaatcagaatactgcctttttcacccaaagcttctgcaattttttctccggcaatttcacccacacgttcattatctgttccataaaaccctgttacaagttcattttcgctgacgttggagtcaaaaatgattaccggaatatcattttctgtggccgtttccagctgagcctgacaggagttcatatcacttgcagaaaagcagagaacggaaggattttctgcaataactgcatcaagggtatttacctgctcttccacattcagttcatcatccggtccttcaaaagtcattttaatctggtcgtctgacttaaatccataagcggtattaagatcttttactgcatcttccatacctttatgtaccatatcccagaattcaccactgacacttttgcttactactgcaattctgcttccggccaaaaccggcgctgatgtatcgatacgggaactgctgtcttctttctcgcttttttctgcctcatcttctgtccgcacatccgcaattgccttttcctcaaaaacatcacatttcgcaaaaatccctgccgccagaactgtacctgtcacaaggactgccgcaacagttgtttttttcattgattttctccccttctgctacatctgtatgtgcttccaaccatttttacgtttcgatacatcaccttatcatattttacattttacgtccatacttttcatagttttttcatgattttgggtaaagttttacacttttccaaaaagcgccgatttctacaccgactgaggaatacaaaaaccggaaaatgcctgaccctgaggtgtcacataaaaatccatttttttccctgtttccggatgcagaaaactcagacagcaggagcacaaccccagaggcagccccgagctgtctttgggattatatttcctgtctccaataagaggcagtcccgtgtgcgacatctgaactctgatctgatggtggcgtcccgtttcaagctggattcttaccaggctgcggtatccggatactgtacggttatcagaaatctcttccagcagtttataagacaaaaccgcttttttagctcccggagtctttttttctgtcgcaaaagacatattttttcttccatctctgtataagtaatctataagtttcttttctttgtccataacttttctgtctgtcacagccagataaattttgcctataccgtctgttgtcatctgtctattgatatttgctgcggcagcagacgtttttgcaaaaacaatcactccttctaccggctgatccagtctgtgcaggactccaagccacggagcattcttccctcctgactttgctgccaggtaatttttcaacgcactttccatatccatgcttcccatttttgcattctgaactgcaagccctgccggtttatgacataccagtatctgactgtcctcataaagaatattttcctgtatatttcctcgccacataaaaaaactctcctttttacttctgtggagagtatactctaaaagactgtttctggcaagaacgacggccatcactttttacttcaatttcaaaaatgatgaccgtcttaacattcttcgttattcaatttttattatcctcatttaaaaaattatcttgtgtctaattggtttctataaagatttaccctatttagtttttccgttccgcatatatttctgtatatgtgattctttctctgatttcctgctcgtaaacattatgattatttatcattttgtttatttagaaagttgatagattttgaaattataacttacggattataatttctgaaattacagtaccctttgtgagaagatactcttctgatgcaaagcttcaattcatacaactcattttacaatttcattatatggatttcaaaatatctttcctgtctgtttacaaactttccaaaaactcttcttttcggcaaagttctgagactggcagttatacttcttcagcaaatatttctttacatattcctgaagttctttgtatcaggttcgtgacagttattcaatacgaaaaatcgtttctatatacctgaagtacgttttccttatacaagtcactttaaattttcatcagatatgatatctaaatcagttattccggtatctgtcactggaattttgttttctgaaaaatatccttgcgattcgtatcttccggattcattcattcagattatttactgaataaatttcacctcatggatttccatccctcagactttttaacttgaaactaaattctcctgatcagatcacaaactataatatcaattgattgttccctgttgtggatttactttacggttcttatgtaccaggtctttcttgcaggaaacacgattcctgtcactgtttcgtattgataaacaagtaatctactttcccaatggaaccacctttacccttcttttgatttcatccttttcatgtaacatttatatatgctatgaattgaatgattttctcttttgtactttgattgctttttcttttgatgagtatataatagcactgcccctcttatttgtcaatacatttttcgattttattttcattttttctacatattttcattttaatttgatttaaaacaattatatttttatttttttataaatttcagataattataaaatcaaactataaataaacaaatttgaaaagatgttcctgttcacaggccattatcccgcgaaacattttatcatatacatgccaaactcctgtattgcctcattatataagcgttaaactgtgaataagaaaatatcgaattttgtacaatagaatccgtaatatacggacataaaagaaatattaaactctatatgcgcatcttaccaaaaaaattcgtgatgattttgtgcgctttttcatatttgctcatctataacattaaaaataatatatcgaccctacaactataaataacatatgattcttttccccctcctctgcacagatcacaagcagcagaaaacataagctcctgttatttgtcttatcctgtccgcttccgggatcgagcagaagcctgacagatctaaaactatgaactttcagattctctgcagactgaagcgccagaacacagctgcaggattttaccataatcctgtatccgactaacgcagacatgccgcacgcctctaaagtcctcaatcctgaagggacttgctccgcttcgagcaccagatgcaaactgctatgggcagtcatattcccctacatctggtcacatcctctcctctaattacatcctcacaaagcgtttttattaaccacaaaaattcgtacagaacgtattactttcccggggcataaaaatagccagagccggatatgaaacgccctaaaatatcacatttcagggacgtctcaatattcatccatgcctggctattaataaattcttattttctgttgtaattgatcagacagcctttcaatatgatttctctttcatcgtctgtcagttctccgagagttacctgaaattctttcaggccttccggtcttaccacatatcctgagatattttccgctttttcagccacagccttacggataccagggaacagaaggtaatctccattctcaaacggaagctctccgtcctgaatcaggaatgggagcataccccagttgatcaggttggaacgatatctttttgttgcatattcattggcaatatttgcccagcctccaagtactttctgacaggatgccgcctgctctctggcagaaccatcgcccggttttaccgcaaagatcgtgcttccaatacccagattgccatcgccgatctccgggaactgtttctgaacagttcccattacctgctgcagttccggtacagcctccagagggcatttgccttcctggattgctttctgagctttctgaatttctttggcgcggcctacatactcgggatcctttctggacaaagtaaattctgccagtccaagaggattggagcgataggatgaggtttctcctgaaggaatcagctcgtctgttgttgtaaccggatcatggatttcagaaactactttcagtacaagattctctgccagctccggcatttccggccagtccttaatgtttggtccgaactggatctccacatctggatctgctacgcccttgctgtcaaaaatacgattttcgtaaattgttttgtcaaagaaatacttctggcctgtataagttccggtaaagttttctgctgaagtcaggaagcctttgtttgctgctgtggctgcaatagatcttgcatccataagcgccactgaggaaatctgtccgttctgtatcttggagccttcgcggttcgggaagtttcttgttgtgtggcgaatgctgaatgcattatttgccggtgtgtctcctgctccaaagcacggtccgcagaatgcggtttttacaactgcgcctgttgccataaggtctgccagcacaccattttttgcaagctccatataaattggtgtacttgcaggatatacgctaagtgtaaaagcatctgcaccgatgctggttcctctgagaatatccgctgctgcacagatattttcaaatccgcctccggcacagcctgcaataattccctgatccacataaagcttaccgtcaattactttatcccttaaagtaaacggtacttttccatccagacttacctgagcttttttctcaacatcacttaaaatatcatcaagattttcattcagttcatcaatagtatatgtattgctcggatggaacggcatagcgatcattggcctgatctcgctgagatccacttctacgcagccgtcataataagccacctgacccggctgaagctttttataatcttcttttcttccatgaatttcataaaattcttcaatagtatcatcggtctgccagatagaagaaagacaggttgtctctgtagtcataacatcaatgccgattcggaaatccgcgctgagacctgccactcccggtcccacaaattccatgactttattcttcacataaccatttgcaaaaacttttccgataatagccagcgcaacgtcctgaggaccaactcccggccgaggttcacctttcaggtaaatagcaacaacaccaggcatattgatgtcataagtctgagaaagaagctgttttaccagctcacctccgccttctcccattgccatggttcccagagcgccatatcgggtatgactgtcagagccaagaatcatttttccgcctccggccagcatttcacgggcatactggtgaatcacggcctgatgaggaggtacataaacaccgccgtatttttttgcacaggtaagtccaaacatatggtcatcttcattgatcgttccgcctactgcacacagagagttatggcagtttgtcagtacatagggaaccgggaatttttccagaccggacgctctggccgtctgaataattcctacaaaggtaatatcatgagatgtcagtttatcgaatttaatctgcagttttttcatgttaccggaagtattgtgagcttccagaattccatatgccatcgtatttttcgctgcctcttccctggataccggctgagtcatgctgttttcttctacgatatcatggccgtttacaagataaacaccgccttcgtacagtttcataatagctcctccattcataaaatatggtctgtataattattttattatagtgcattttcagaaaatctgcaatgaattttctttacttatacacagagaatctgtatactggttactgatattgtttaagcagaagcttgtgctgtcagcaaaaaggcagcggaatggaggattttttatgtttcgtttatggggaaaaatatggaaaagtaatcatttgataaaagataccgtagtatgcgatgattcagatgacaccagaactcataaaatcttcagaggcctggaagagatctgctatgaatttgacctggaaaatcccatctggcttgacagtaccattacggactttaagcgtcattccaaaacgagattttaccaggatagttttatagaacagatagaattcgattatctggaaattcaggttatcgaagaagactgatcattttagttttttgttggtaatggacagataatctctgtcctttgcttttttgcggggaacaaaaagggaaatcacactgcgttttcctcttcctcttgcataaacgaaaccgatcactgagaataccacagctcctataaaattcacaaaaaggtccttcatagtgtcataaagccctatatccagatatcctccaagtcccagcgcctgctgtgtcccatctccatgaaccagaattacgtccgcgatttccctgacagcaattgagtgattggcttttgccggatccagcataacactgcttaccatatttacaatggtatccttttgcatatcaaaattcaggaaccggtccactccaaactcaaagaattcccacattacgcctacagtcatggaaaagcagaatgctaccagcgccagaaaaaagggcgacaggtcaaaggtcagtttttcattatcatttaataataagaccagggaaaaacccacagccgcacacaaaaagccgttcagcgtatgaagaatggtgtcccatccggggattacaatataaaaagcattaatctcccctaggatctccgcagcaaaaataaagcacaaaatagaaatttccagtcctatcggtatctctatcctcagctttacctgaagccagcttggaatatacaaaagaagcagcgtcagtacactgaggaagaagctctcataattgtgcagaaaaatctgacgcaccatacacacaattacaagaatcctcagtatagaaaatacaataaaggtacttctgtgctccttcagttccatattcactgcctgtctcagtgccttcatccggttctttcttttttctcttttgtctttcatatcaagttttctcctaatgacatttttctacatcagccacctttttacaaagggaattttcctaagtaaggctgctgcgatccagcttattataaaaatcagaaatataacaatgggaattgcaatgatcgtgttgctcatcatcatactgtcaatgccgtttctgtgaagaagatcacgcaccagcgcatggatcaggtaaattccaaagatacagacttccgctgatcataataaaaccagctaccgcgaaccggttaatgccatggaaaaaatttgatactttccaggtaaaggtgtctatgggaatatccctgaaatgctgagaaccttcatgaaggccgatcactgcgatacaggctgctatgcgcagcagttcaatccacgtaattcgttttttattcatatcagtaaaccctgtttctgtcctctccggccagaaatgcttctatattttttactacctcatctctgcatcggaatcttgtttccacaggcgcccatgctatatgaggtgtgatcagaagttttttgctgtcctgaatcttaataagagggttatcttctgccataggttcctgtttcagtacgtcaagccccgctccggcaatcatattttgtgtaagcgcagtataaagatcctcctgatttacaataggacctcttgccacattaatgagaaccgatgtaggtttcatttttttcagcgcctgaagatcaataagattttctgtctggctgtttaacggcgcatggattgacagaacatccgactcctgtaatattgtgtcaaaatccacctgtttcctgtcagaggtcagctggtattttcttccggatgcagaataacagatcactttacagccaaaagcttccgcaatgtccgcaaccttttgcccaatagctcccattccgatgattccccatgtttttccgctgagttcataaaaacgctgggaaaaatacgaaaaattgcgattttttatataagcgcctgattttacatagtcgtcataaaagctaagtttttcccacagataaaaaaacatggcaaaagtatgctgggcaaccgcatctgtggaataaccggctacattacaggcatgaatgccgcgttttttcagatattctccatccagattattgattcctgttgctgtcagacaaaccagtttcagattttttgcgtctttgagagtttcctcacacatgggaagcttgttcgccacaataatatccgcatcctttacccgttcaggcatctccttctctgaagtggatggataaattgtaacttccccaagatgaagaaaaggggtgaagaccatgtcctcacccagattttctccctcaagaaaaataattttcataaagtatcagagtcttttaaggagctcttctctttctttttcatagcccggcttgccaagaagagcgaacatattcttcttatagctttcaactcccggctggttaaacggatttactccaagaagatatccgctgacgccacatgcaaactcaaagaaatagaataactgtcccagatagaactcgttctgctccggaatatcaactctcaggttcggaacctgtccgtctgtatgagcaaggattgttccgttcattgcgcttttattaacaaagtcgaccgtttttcctgccagatagttcagtccatccagatccactgcttcttctccgagaacaagctctgcgctggatttttctacattcataactgtctcaaacaggatacggtttccatcctggataaactgacccatagaatgaaggtctgttgtcagatctactgctgccgggaaaatacctttctgatcttttccttcactctctccgtaaagctgtttccaccactcattgatatagtgaaggcttggttcgtaatttgccagaacctctacagtttttcccttgcgaagaagaatgttacggattgcagcatatttcagcgcgtcattatcctcaaaggcattgttaagcgcgatctcccgtccggaagcagctccttccatcagcttatcaatgtcagctccgcttactgcgatcggaagaagtcctacggctgtaagtacagaatatcgtcctcctacatcatccggaacaacaaactcttcatatccttcttcatctgcaacctttttcagggctccgcgagccttgtctgttgttgcatagattctctttgcagcgccctcttttccgtatttcttttcaaggatttccttaaatacgcggaaagcaatggcaggctctgtagtagtaccggatttagaaatcatgttaatagagaaatctctgtctcccactacgtcaataagcccctggatatagctgctgctgatactgtttccaacatagtagatctccggtgttttgcggatttctctggaaacattattataaaaaccatgtctcagaaactcaattgctgctctggctcccagataggaacctccaataccgattacaagaagaacctctgaatcttcctgaatcttcttagctgctgctttaatacgggcaaattcttctttatcataatcaaccggaaggtcgatccagccaaggaaatcatttcctgcacctgtcttttctgtcagggtttttgccgctgcctctgccagtggcttcattgcctcgacttcatgatctgcgataaaacagcctgcttttgaataatcaaatgttactttgctcatggctctcactccttttactattttcaatccgtatttcttatacagaaacggatcggtatatctgaattttcttcagcatctcttcctgatgctgtccacgctaagtatagcaaaaacttgccttttctacaagaaggagatcctaacaaagtataaaaaccaacgccttggaaacagcagctgatttctgaactgtatcagttcataaactctctgatgatctccctcataatttcctcttcttccggactcagcattttgctgaaatgacttcccgtagccgccgtctgccggatgcttgcagtgatcttttctaccatttcctcctggaacgcaggatcctgcttctcgcataccactgtttctgatgctctcctggatgtagcagcttcttccttctttgcccgggcctgcagaatatagtctgctagagaattcataacaagatcttctctgtaagtaaaatcaagggcctgtcttaaaagaagcagtatcacaggtactgctgttccgatataaagatactgcatagaaaggccgtccttaagttctagcctggtggctaaaaaaagagccagtcccaggcaccccgctgaaagaagcgacggtccccacacaagaagattcatcctgttgagaagcctgtccctggtcttccagaggttcagccatttttctttcaggttcatcactgcttttgtttttcgcatggctcttctgtaggtaaggtgtacggccagcattcccactgctcccagtgcgcccagcgcagtcatggtatagagcagaagatgcagatccataattcgttccagcatgattccctccttgattttcatattccggccagccagattctgaagcatctctccagccggcttatgcctttcattttacaccctgaaagtcaaagagggaacaaaaatcgttcgtcaaattctccctggtttctacagtttttccagtgtctgaaccacatcctcaaatttcataaaatgggatgcctttaccagaaccgtatctccgggctgtatgtaatcacctaaatgttgcagaagctcctcacgggttctgatatggcagatatcaaaatcaggatctgttttctttgccgcctctgccatatgtgcagaaagctctcctacgcaaatacatttgtcaattccgcaggatgccgcatgagctcctacttcctgatgaagctgaacctcattttctccaagctctcccatatctcccagaatggcaaccctcctgccggctccgtccttcagaacgtccagagacgccttcatggacatgggatttgcattatagcagtcatctacgatcagaagcttgtctgtttcgatcattcggaaacggccgctgatgggctccagactttcaatccctctcctgatctcctctgctgtcagaccataaatttttccgatcgccgctgctgcaagagcattatataccatatggattcccggcatcggtacaagtacagaaaagctctgctctcccatatggatcctgcaggacattcctttcagacccagactctgaatttcatccgcatatacatcatactttttatttaaaccgaaaaataccggacggattccatgatattcttttactgtgccaagcttgtcatcatcgccgttaagaatgatatttccgtcaggcttcatagaagaaaagatctctgtttttgccttcagaactccgtctctgtctccaagattttccagatggcaggttccgatatttgtaatgacacaggtttccggctttgcaatttttgcaagtctggtcatttcgccaaaatcactgattcccatttccagaactgcgatctcatcctcatctctcagtcggaatacagtaagaggaagccccagctcattattaaaattcccctgggttttcaatgttctgtacttttccttcagaacagaggcaataacttcttttgtacttgtttttcccacacttccggtaattcccacaacaggaatctgaagctgctccagataaaattctgcaatatcctttactgcctgaagcgaagattctatctggatataagcgtaatctgccccttcctgcagtctctcagaaagggttgcaagacagcccttttccattacatccggaataaacctgtgagcatccaccctctctcccacaatgggaacaaaaagagctcctgtttccgcttttctgctgtccgtggtcacagacgtcacttcccggtccagaagctcttccggtccatggtaagtaccgccgcatacctttgttatatttcttaatgtaagatttttcataatatctgttccttaccttccggataaaagatttcccggaaattcttatttatattttttctcagatacccggatcagttcctcacataacgtaggataatccatgccaagaactgctgcctcctgagggatcagactggtaggagtcattcccggaagtgtatttgcttccagacagtagattttttcatcatctgtaacaataaaatcaagtcttgcatagctttccagtccaagagcccggtatccctgaaccgcatagtcctgaaggcgtctggtaagctctgaagaaatgggagccggacaggtttcctttactgcccctggtttatatttgttttcataatcataaaatccctgacagggtacgatctgaacaaccggataagcttttccatccaccacagctactgtatattctgtaccctgaataaattcctctactacaacctcttcctcatagacaaaagctgcatccagagctttcatatattcttcctggtcttttacaatataaacgccgatactggaaccgccgcagcatgtttttacaacaacaggaaaggcaagacccagctctgccagatcttcttttcgtgtgtgccgcttcatggtcactccgcccggaacaggtactcccttcatctggaacatccacttggtcacacctttgtccatggccatagcactgctgagatatccggttcctgtgtatttgattcccataaggtcaaaagcggcctgtatccttccatcctcaccgtttgctccgtgaagtccgaggaacacaaaatctgctttcttacacaattccagtacatttggcccaaagaaatccttgcgcatctttttcagctgctcaatatgcggattaaagctttttatatatgcgctggcagcttccacatcatattcccggggaaaagggtctgcccagtcaactgtttccgctccgcagaaaacatctacaagaatagcctgatgtccctttgccctcagtccattacagatccctgttcctgatacaatggaaacatctctttctgtacttgttcctcctgctaaaacaacaatcttcataattattctcccttactgccggaggtctggtctgtacagcttctccgggtacttttaatgtaaaaactgctgcaaaaatccctgccggaatctctgcagcattttcattctgtttatttataaatcactaccggcataccggatctgacattctggtaaacctctgacgccatatctcccggaatctcaatataaccactgttatctgtccatatgcctccgtctgtactgctttctcctgagccaaaatcactgactgcgggaataccttcctcccagaagcctacatcactttgtgtcagattgggattatccaaaattcctgcattttcttcgtagggaatccagaaatttacagtccctccgttgacctctgcgggagatttcatttctccaaccatgtaaacgccagtttccgttccgcttcctgcgctgatcccggtatctgccacaggagtaccgtcctgatataccaccagcctctgagccggcagatcgatctccacatatgtataaccgatatcattggtgttgcggctcattccactttgtttgtattccggcttacgaacctgaatttttttacttataatctcctgataaagcgcctcagcttctttttcctggtcaatgacccatccgtaattaccgccggaaactgaaatctgtcggttatcataagtctcaaaggttctctctgtacctacagtatcatatttggctccaagagtctttacataatctgcgatcttttctttatcaagaacaagatcttcattttcgtctctggaaaggaaagtacggatcacattccggtccacagtttctttgcggtcatcaaaatcataggtgatcacaacatctgtcagctcattcatctgactgcagtcctttatgagccttttatcatctccgtaaacccggggattgatatagcatccgtcctcttcaagatctgccaccggatcacctgtagtcagcgcctttattactgtttcacgaagcttttcctgatctaccagattcccctctgtctcaggaacaatggcaaattcatttcctgtatcttctatagacgcatccacaggctgcacattgtcctgaaggcacttaaggttctggaatttctgctcaaaaagctcctcctgatagaaaacagaggacggaacctccagagcgctgtgctgtccaaatgataaaaaccacagaaaacgattctggtcattcatcagtttttttacgcttccatccggcttatataccagaccgatttcctctgccgacatgctctcctgaccgttccctcttgtacgtactgccagaacataggcctgtgtttttttctccaggagcttttctgtctctgcctgatccatataggaacagttaaatccgtttacctgagttcccggcaggaaatgtccggaaaaataataaactccatagccgtagacggctgctgttaataccagaagcacagcgatcagactgaccaccagttttctgcctgtgctcatttttatcttttcttctgtaccgttttccttcacaggctcctgctctttcattttttcttccatgcagtctcccttctgcttctcaggacaagctgcctgacatgtgtcttttgctgaaaaacagtatcggaatctctcttattctcctaacagcttttctacacttgccagttttacacatactacaaatacataagctgctttttcaagctcctccatagacgggaaagtaggcgcgatacggatattggaatcctccggatcctttccgtatggataagtagctcctgctcctgtcattacaacgccggcttcttttgcctttgccacaatattttttgcacagcccttcatggaatcaaaggaaataaaatatcctccctttggagttgtccactgtccgattccaaggcctccaagttctttattcagaatatcaagcaccagttcaaatttcggacggataatattcgcatgttttctcatgtgttcatgaacgccttccagattcttaaagaatcttacatggcggagctgattcagcttgtcgtgaccgatggtctgaatctgcatatatttacggaagtcctcaaggtttgccttggatgcggcaactgctgcaatacctgatcccggaaaactgatcttggaggttgaagtaaacttatatacaatatccggatttccggcttttgcacactcagtaaggatctcaagaaggaaatcctgatcttcatcataaagatgatgtacactgtatgcattgtcccagtaaatacggaagtcaggagcagccggcttcagattggcaaatctctggactgttcttgctgaataagtatagccctgaggattagagtatttcggcacgcaccagatacccttgatagccggatcttcgctgacaagcttttctaccatatccatgtccgggccttccggagtcatgggaacattgatcatttcaattccaaaaaattctgtgatcttaaaatgtctgtcataccccggcacaggacaaaggaatttcactttatcaagcttactccagggagtatttcccataaccccgtgagtcatggaacgggcaatggaatcaaacatgacattcaggctggagtttccataaataataatatgttctggatccacctcggaaatttctccaagaagacgttttgcttccggaataccgtcgatcacaccgtagttacggcagtccactcctgtctcacatttcagctccgcgccatctgcaagaacctgcatcattcccatggaaagatcaagctgatctgttccgggtttaccacgggacatatccagggcaagtccctgtgccttaatgtctgcatactgctgatccagttcttttttcagggcaagaagctgttctctgctcatttcactgtatttttccatgtttttcctcctcgttccgctcttttcggacttttttctattacattgctaaaccatactatcccgtctattttagtatgctaaattccctgttgtcaagtcctgtaagcattgtatttataaaaactctgttcgtttgttccgggatcttggcatatatgtaaaaacatctgatgggataatgccgtatgaccagcagcaatataacctgtcaaaagtaaactccgttctttttcacttgcagatttacggcaattcccctatactggggatagcatcagtgtatgctgattttattaaaactaatgagaggttatcatttatgtggattgcagatcaatggaaagaatatgaagtaattgacacctccggcggagaaaaactggaacgctggggaaaatatatcctggtccgtccggacccgcaggttatctgggataccccaaaggtaagccggggctggaaaaatatgaacgcccattatcacagaagcaaaaaaggcggcggagaatgggagttttttgatcttccccaacaatgggatcttcattataagcatctcaccttccacctgaaacccttcagcttcaaacacaccggactttttccggaacaggcggtaaactgggactggtttggggaaaaaatccgcaatgccggaagaccggtaaaagtactgaatctttttgcctacacaggaggcgcgactctggccgctgccgctgccggcgcaagcgttacccatgtagacgcttccaagggcatggttacctgggcaaaagaaaacgctgccgcctccggacttgcagacgctcctatccgctggcttgttgatgactgcgtaaaattcgtagaacgggaaatccgcaggggcaatcattatgatgccattattatggatcctccttcctacggaagaggtccaaaaggagaaatctggaagatagaagatgctattcatcctcttatcaggctgtgtaaaaagattctcagtcctgacccgctgtttttcctgatcaactcctacacaacaggtcttgctccggctgttcttacctatatgctggcaactgaactgaaagaatttaacggaaccgtagattcccaggaaatcggacttccggtcacctccagcggtctggttcttccctgcggcgcttccggccggtgggaatctgtgtaaaactgatttcagataaaattattggaggaaattacaaatgagtaatttttcgtcagcctttaaaaacatggacgcaaaaatagaactgaaacgatatagttgtgcagtgattgctgccgtgctctttgccgtgaacataaaaacctttgtaaaagccggaggactgtatccgggcggctttaacggtctcacgcttctgatccagggcatttttcaggaatttgcgggaatggaaattccctacaccctgatcaacgttatcctgaatgccattcctgtttttataggactgaagtttatcggagttaaatttaccatgagttcctgtgtggtgatcgttctgtccagtattctgacagaccttattccctcacagcccattacctacgatccgcttctgatcagtattttcggcggactgatcaacggttttgtggtcagtctctgcctgatcggaaatacaagcagcggcggaactgattttattgccatttatttttcagaaaaaaacggacaggatatctggaattacatcctttgcggaaacgcagtgatcctggttgttgcaggcctgcttttcggatgggataaagcgctttattccattatcttccagtttacctccactcaggtggtacagatgctccatcagcgctacaaaaaacacactctgtttattattacaaggcatcctgatgaagtctatgaagaaatttccaagctgtcccatcactctgccacaagaatcgacggtaccggctgctacagcggcgacaatacggcaatgatctattctgtagtgtccagggacgaagcaaagatccttgtgaaaaaagttacggaagtggatcctcaggcatttgtaaacattataaaaacagactttatcaacggaagattctattataaaaccgattattaaaaaattgtattttttctttctgttttcttgattctttcgctttccagaattataatcagataaaggagagtgatactttatgaaggaaaagtatgacgaaaaaacagaggttccttttacctgtacgccggaatatgaccgcagctcctgcggaaactgtgtatgtgccacctgctatgaacaggaattctgtgaccgttgccggacctgtgaaaatcagtcccggaaaaaagaatcctgctctgcttatgagggagcctactgctactgaacacacccacacaaaaagagtacggacatcatctggtatgatgtccgtactctttttgctttcgctgcagtcctcctcaaaattccttttcccggaaatccatcctgtcctgcagggtatgattatgcctgtttcggcagggtcactgtaatctcagttcctgaatccacttcgcttgtcagctccagtgttcctcccaggaaggcaactccgtgctttacaatagaaagtcccaggccggttcctccgatctccttggaatgacttttatccacccggtagaacctctcaaacacccggtttctgtcctctctcgggattccgattccattatcctccacagaaatctgaatggcattgccaatatctttcagatgaatggtcactgtgccattgtccttattgtacttgattccattatcgcagagattataaagaatctcctcaaaaatcggacgcacagtgcggcagatcagtctttctccgtcaatgtaaagatgcacgttctttttctgcgcgatttctttcaggtttccacatacattccgggcaacggaatagatatccacattttcccactcataaggattttctccttcgtcaagctgagaaatcttaatggtgtcctccacaagctgaatcagcctctgagcctcccggtaaatcctgcctgcaaactttttcacatcctcttccttcacaaagccgtcctgaataatctcggcaaaacctgaaatagaggtcagaggtgttttcagctcatgagaaacattggcagaaaactcccttctgaggttttcccgctggattttttctgtttcattcatcagaagcagcactgcgcctacgatttttccgtctcttgtaaccggatttgcgatcagctgcacaaattcattatccagacgaagaagagcgtttccgtgttttccctccagaacatgttctatcacctttctgaaatcctcatctctgtcaagagagtatacgctttggcctatgccgggttcatttacctgaaaaatcctccaggcgcttgaattaccggaaagtatcatagtataaggatcgatcaccagaagaccttcctgcatgttttctgtaataatagaaaactcctcctgatttctccttgcttcctccagctgtttctgtatctggcggttctgccggtttatttttcccagaagaggagccacctcttcataaatttcattttctccgggcttttccagatccagttcattgatgggttccacgatctttgaagcaacctttgacgcgatcactcctgctatgatcagcattacaaaaataatacagagtaccggctgtacaagctgcagaatcagagcaaatacagaatactgtgtactggatacacgaagaacagaattatcggaaagtcttattgcagagtagactgtcttttctgaaagcgtgtcggacatacgtaccgcctcgcctttccccttgctcagcgcctcctgaaactcttcacgattcttatggttctccattttgttttcatctgctgtattgtcatacaggacatttccattctcatctatataagtaattctggaatcaccgtatttgatctgctccagatactcctgcccctgctgctctactccgtaagccagatatctggcttccttttccagctcactgttcagctgctttccgaaatactgataaagaattcccataacaaaggcaacccccagtatcagaactgctgctgaagcaagaactgtagacttaaaaatcttttttgtcaattcttatttcctcccatttggtgctcattgtttctgtgaatgcctgtaatagaatactccacccattctgcaatgttcaccgcatggtctccgatcctctccatgtactttgcagtcatcagaagatccagccctgctttggcatccatatttttgtagatcagatcagccagcttgttttttgtctgattaaacagctcgtctacaagatcgtcatcatcaataaccttacgacaaagcgccagatccgctttcacaaacgcgtcaatgctttctgttaccatatgaacggttttttccgccattctggcaatttcatccggaatctccacaacgcttcggtcaataaacttggaaaggtctgcgatatctgccgcctggtctccgatgcgttccatatcagagatcattttcagagccgcggaaatctcacgaagatctcttgccaccggctgctgatgaagaagaagccgcatacagatggcctcgatctcccgctccagtccgtcgatttctctatctgtttcaaaaacctctccggcgcagtcctcgccctggattgcctttgcagaaagagcaattaccttttcgcagagacttcccatggtaatgatctgtacatgaagctcttccagctgtctttcaaaacgtgttgccatatcagccaaacctccctgtaatataatcttccgttcttttatccgcaggcatggagaataaagtatctgtatcattaaattctatcacttctcccagaaggaagaaagcggttttgtcagaaatacgtgtcgcctgctgcatattatgagttaccataacaatggtgtagtcctttttcagctccattgcaagctcctcgatctttgaggtggaaatagggtcaagggcagaggtcggctcatccataagaagaacctccggctgcactgccagagcccttgcaatacagagcctctgctgctggcctccggacattcccaaagcgctcttttttaaccggtcctttacctcatcccagattgcagcatcccgaagagatttttccacaatatcgtcaagctttgccttggaacggatgccgtgggttctggggccgtaggcaatgttgtcatagatactcattggaaatggattgggcttctgaaacaccattcccactctttttctcagaagattcacgtccatatccccgtaaatatcttctccgtcaagctccacctttcctgtgatcacacagccctcaacaaggtcattcattctgttcaaagatttaagaagagttgattttccgcatccgctgggcccgataaaagcagtgatctccttttccggaatatgcatattaatgtcttttaaggcatggaaactgccgtaatgaagattcatattttcaatagaaagctttgtattattactcatgtatccttatcctttcgcaattcgttttgctgcttttcctgacagccagttaataaccagtacaaaaacaagaattacaaccgctgtggcagatgcctgattcatgtggaggccttcactggaaagcacatacatgtgaagagccagtgtacgtccggatcccatcagatcgggaacctgggcaactgtaccggaagtataaagaagggctgctgtttcaccgataatacgtccgattgcaagaataattcctgccagaatccccggaaccgctgaaggaagcacaatggtaaaaatcgtgcgcagctttcctgctcccagtccgaagctggcctctctgtaagaatccggaactgccttcaaagcctcctcagaagttctcataataaggggaagaaccatgatcaccagtgtacaaatacctgccataagagacattccccactgaagggctgtcacaaaaaacagcataccgaaaagtccgaatacaatagaaggaataccggaaagtgtctctgctgtaatacggatcacctttaccagacggttgcccttctgagcatattccaccagatagatagcggcaaaaatgcctatgggagccgcaattacaagtgtcagaacagtcataataaaggtattgataagagaaggcatcagcgatacattctcagaattatactcaaagctgaaaagctcaggtgtcagataaggaataccttttatcagaatataccctaccagaaagatcagtaccgcaaaggtcagtactgcagccagtcctgtcagaaaagcaagaataccggagcccggatggcgcaggtaggaacgaagctgatctgtaagggaagagctgtttctcttttttgaattgacctgtgaattcaaagccgcagcattagtttgcattttccgccctcctgttcagtaatgaaagacttaagttaatgatcaggataaagacaaacaataccacaccggtagcaataagcgcctctctgtgcatacctgtcgcatatcccatttcagtaacaatatttgcagtcatagtacgaagtcccttgagaatcccctgaggcattctggcctggtttcccgctaccataataaccgccatagtctcgccaatggcacgtccgattccaagaaccacagctgcaagaataccggattttgccgccggaagcattacgcggaaaatgctgcgttcctttgtggctccaagagccagagaaccttcataatagctttccggaacactgcggagcgctgattctgtaggtccgataatggttggaagaatcataattccaagaagcagggacgctgccagccagcttgttcctgttcctccaaaggtttcccggatcattggcaccatgaccaccagaccgaaaaatccatatacaatagaaggaactcctgccatcagttcaatacctgattttaatggtctgtaaatctttttcggacagtagcgggccataaatacagatgtaagcagggccacaggaactcctaccagaattgctcctcctgttacataaatgcttgccacgatcattggaaaaattccatacagatcgttggagggccgccattctgttccaaaaagaaattccagaggacctatttttccgattgccgggattccgctggcaaaaagaaacagacagatcaggaatactgccagtacagaagcgcaggcagcaaccataaatacaattttcattccccgttctttgattttattcataaaatgatttcttcctctctaacttcctgactgcagaacggaagcccggatttccgggctcctctgcgttctgtcatgttatgcaggttttattactctgccagatcttcccattctgttgtctcgcctgtgaagattgcttttacctgatcgcttgtcagatcctcaacctcattttcattatttacgactaccgcaataccgtcttttgcaattacagtagctgtaagattcatctctgtttcctcatctttcagttcacgggaagccattccgatatcacagatgccttctgctgcagatgtaactcctgttgtggaatcgctctgctgaacctctactgtaacgtttttgttcactgcttcataagcctctttcagtttttccattacaggagaaatggaggaggaaccggctacaacaaccttaccttccacatctgctgcctcataaggttttgcttctgcatcagctttgatataaccgttgtcctcaacgatctgctgaccttcttcgctcataatatagttcacaaaatcctgtgctgcctcgcttactttctcgcctgttacaatgttaaacggacgggaaactttatatgtatcatttgcaacgttctcagcagttgcctcagctccgtcgatttttacagcctttacagtatcgttaagagatccaagggaaatatatccgattgcattctcatcgcctgctacagttgtcatcataacggaagtgctgtttgtgatgctggcatcaactgttgtcatatcaattttttcgccgtctttttcttcctggatgccgaacagctcaataaaagcgcctcttgttccggaaccatcctcacgggaaattacattgatcgttccgcttgccgcacttgcaacggttgcgaatgctgttgttccgattactgctgctgctaaaattcctacgatttttttcttcatgataagtctcctcttttttataaataatgttttgtatttctcattgacaagtgtcattataggcagggaaagttaaaaccaaaatcctgcctgcgtaaaatctttgtaaaaaagaaaagacttccctattctcattcctgatacatctgaagagtttcagaagcatctgtttcctgtgctgattcttccggaagagttacatgaagctctgttttcattacatctgccgcgcttttggcgtcttccaagtacgcagttcccatgcagatgatctcctcgggaaattcactttctgtggattctctttctgcagaaacatagatttccatgcagtcatcctctgtaagaacgaaatccatagaatttgtaaaaattgtattctctcctccatgctttacaccaaacccaattctgacaggctccagattatgcttctctaaatactgaccaatcgtcatgtccccttccttaccaaggtaatatacagagtcttcttccatagcatcttgtggaatcagaaggtattttcccggttccaacgcctctgcccgtgcagaaacatgaatactgtttccctgaaccagaacctctttcactgaaaaattaatcatagaatctcctgtttccttataagtaacttccttgttaatatcactttgcacattttccggcagctcctgtcctctcagcttccagaaatctgtgatccccagatatttttctgctgcaaaaacagacacgcccaaaatcaggatagcggcaaaggataagatcaggacacgtctgcgtttacggcttctgccctggagagagaaggaagcaattttatctcttccgaaatccggctgctgttcctgaattttattaagggctgcctctatcctgtctgtaacgatctccggcacctctgtttttcccgaaaaaatttcaaataatttgttatccatagatttttcctccttccagctcccgtttcagcaacttcctgcctctggcaagtctggtaatcaccgtattgcggctgatatccagaagctccgcgatttctctcgtatccatttctcttgtgtaatacaaaagaagaatgatccggtatttttcatccaggcaggaaagaacctctttccattcacagtctatgtacccgctgtcctcaaaagcagattcctgcatttctgcctttgactgtatcctgcttctgtgttttaaaatatccttacactggttaatcaggatccgtatcatccaggttttaaaataagcgtcttttttcagggtttcaatcttttcgtaacacaccagaacagtttccgaaatggcgtccgcagcatcctcatcattgcccagatacgtccaggccactcggtacatgctctgtgtacacagcctaaccagctctgcaaaagcagaagaatctccccttttggcctttcttaccagttcttccatttttactgctctcctctctgttttcttatatacattagacgaaaaacagaacttacctatttcatcaaatttttatttataaagaaagagccgatgatcacatcagccctgtaatttttttcgcatgttccagttcatttttgtgaaccagaatttcatattcatatgtctcgtctgcaggaatgccggcgcttcctgtcctgccgcgcatggtccctgcctctgcccactggcccatgcggtttttcaccttatgtttgtaggtgattccgacctgttccagctgttcacgcaatttgttaaataatttcatgtctgttccgatccacagactttcggaatttaataatgtgagcatagacattcctccccttttccgctgcgaaacctgactgtcagttataatttcactataaactgcaagtccgataaatgcaagggagaatgttttcacataagggggccctttatctttccctgctttttagataattggtaaatccctctgaaatgcgcttgtacaaaaccagtctatttcgccacatttgcatctccggcagccggattgttgatcagctttccatcctcttcaaaccgggatccgtggcaggagcagtcccatgtgtgctcctgaggattccacttcagcgcacagcccatatggggacagcgcttcatagtaggagtgagaagccctgccagagcttccagtgtatttacaaacagctgcggtttccatatacttcgcgatggatcaaaaactgcctcccacccagtttcccggccgcagatcatctctgtcagaatatgcgctgctgccatggaggtagtcattccccattttccaaaaccggatgccacatacagccccggtgtgttcggggagtattctccaatataagggatgccatccagactcatacagtcctgggtcgcccaataataacctgccttgccgataccataatactcctgtacaaactcctgaagctcttcccaacctcccccttttcttccagttctgtggcttcctccacctaccagaagataatctttgtaattgcggaaggacatgcccttctgcgcctcatccacatacattccccttacatctgaaacatttttcagtgccataacataggaacgatgctgatataatttcaaaaaatatgcgccgtgcttattcagaaaaggaaaatgtgttgctgcaatcatccgtctggccgtgattgttcccccgtcatatcgggcgcatcccggcgcaagctcctggataaaggtatgctcataaatattcaggtctctggaaatataagccagaaatctcctgggctgaaactgtgcctggcgtggaaatttcaccgctccttcagtgtcaaaaggcagatttacctcctgcacaaactccgcaggaaagccaagagtctccaaagcctgcacctcccgctctattttctgccagtctgtcagagtataaacaaaggcatccttttcctcaaaatcacactctgtttcctctgccagctccctgtatttgcccagagcccactggttggcgtccagatactgaagtgccttctctttcccctgtgtacgcagcagcttttcataaatcagcccgtgctgagaggtaatctttgccgttgtattacaggtaacccctctccccacagcatctccctccacaagcacataatccactcctgcctgcttcaggaaccaggcgcaaagtactccgcacagaccgccgccaataaccagcacatccgtctttatatctccctcaagcttcggaaaagagggaaattccacatccctttcccagattgactgcctcatccaattcctccgatctcttggtaaatttttttcatcatattttcttagtctgtccaagaaaccagagagccatgcagaaagttttggttttatccgtgaccgtaatacgcattcctgctgtattttagaataaagcacaccagaaaaaggtaatcctcatggaatcatcaactgcgtgcttccgcaaacgcagtctgatcagcatcaccaggaaaatttctcctgttcgaaggcagggggcccgtctaaaaattacactattgtcaatataagatgcaatttttgcacttttatatataagtataggtaaattataaaatcaacaacatctccatccacatcagtgttttatgctggactgttaaattcactggaaacaaagcttgagcagagcagttgaaaattaattcctgctcttcagatagtttaaaaatcctgttccataagcaaccgccagcattccccatatcactgccgcaccaatggaaggtgcgttcatattctgtatagcatcccatacacgtatgccaaaaataacaatcataaaaagcaaaactcccacagcgcctgctcccacaagccactttctcatgcccatacccataaaggaaatcccccacactcctgctgtggctgaataatctccgagatcttccagaagctcccgtacctctgcaaatcttccgccttttttctcttcctgataaacataattaagatactcttccagtttctcattctctgggatttctgtctctttcattaccagcttacagagctctgatgcgcctttcagttcagtaatctgctcttccagcaatcttttctgttctgctaaaacctctcgcagattcgcctttccttttaaaagaagttcaatggtttccactgaaattcctatcttccgatacagaaaaatctgttttattctctgcacatctgcttctgtataatcccgatatttacttccgctttccctctcaggaagcagaagtccctttcgttcataaaaacggatactactcacattcatacctgtcagttttgcagcctcactgattttcattatatcttcctccctcttaatctgttttacggagacctttctcctgaaattgtggaaattataaaccctgaacctggtgcaaagtcaagaaattctcaataatattttgtaaaatacgaaatctccctccacagaacatttctgccctgaagaaggagataagctttacttattcagcggaaagcatactgtaatctttgtgcctctgccttcctggctttctatcagaatcccatagttttcaccataaataagtttcatgcggtcgtccacattattgacgccgatcccggtaaaatgttccctggaggcattctttttgttcaataaatcccttaaagtttcactgctcattccgatcccgttatcctcaatctccaccctcagaagtccatcgctctggcgtacaaaaatagagatagttcctttttcgccctgaggaaaagcatgaaaaaatgcgttttccacaaagggctgcaggatcagcttgggaactttctgttcctcacagtccggtgttacataaaaatctacgttcacctgatttccataccgtatctgattgatcagcacgtaatttttcagattttcaatttcttccttcagggtaataaattcatttttgttgctgatggtattccgcagaagctgtataaatgcatctatcacctgaacggatttttctttatccccctgccagatcagccacttgacacttgccagagtattataaatatagtgaggattgatctgcatctgcagggaatggatttctgcctcacgtttggatttttccacctgcatcagtttctgaatataattatccagttctcccagcatgtcattataagtagcggaaagctcccggatctcctgagttccctccacctttaccagtttatccagtcttccgtcctgcaccttccgcatattctctatcagcttggagagaggcttggtctgctgccttaccaatataaaaataatcagaatagctgcagctgtaatagcagctgttacttctataatatatcggaaatcatatacactttcaaaggcctgatccgggtgaattactcccattgctttataatccgtattatgaaaattctgcatcagataaacggttctctgcccattttcctgtctggtgatcatagaactttttttatcctgcatctcctcaagtgcgtcccagaccttttctatttcactggatgaggtcagatattctgtatagttggaagagataatttcattatcctgattaaaaatcagtatatcattggaacttgtagtaaatacctcataattattccggaaatccttctctttaattgtaagaagaatcaccccatctatggtttttcctccattattggtgattgcctttgccatcataataacaggatagcttttcattacgtctgtatatccgccgcttttatatcggcagatcagctttttaggcgtttcatatgcctgctggataatctctgtttccaacagttcttcccctgaaagaatcagacgtgaggtactgttataattatatgtttttccattgtttccaactaaaatcagactcatatcgctgtatttcgcaagaggctgctgctgaagaatttttttcacatccagaatattccggaattcctctgccgcctcccacttttccctgcccagatactcccgtacggaagagcttccgcagatgacggaggtagccgcagttacattctgaaaaagctcataaatattttcatcaatctgtctgaatattttctgctgagattccacaaaattctctacaaaaacatcctgggaggtcttaatattcagcacgcttaatgcccctgccagacataaaatcgcccccagcaccacaataataatcttaaaaaaaagtgtattacatttatttttcatttcgctgaccacctgagtttttcctgtgccggtactgacttggcgtctgccccatcagcttccggaatatcctgcagaagtacccgtgatcggaatatcccaccgctgcactgatatctgaaatagacatttttgtctcagccaaaagatcgcaggatttttcaatccgcaccgtattcagatatccgctgaacccttctgaaatatgctgattaaaatacgaagaaatataatgataattaaacccgaattcctgggcgatatctgtcagatcaagtttttcattataatgttcattgatgtaatctttgatctgagcaacaacagggtctgaatgtgaattattttcaatcccggacacaatctcccgtaaacgcgcaaatgcccccccttcacagtattccatatattcttctgcactttctgactgatcgatcttccggaaaaactcccctcggagcctgtcgctttccacaccgtacttttcaatttccattaaaaaattatacaaaagatttttaagaagatttttgcttagatactcatcatatttactttctgccaaataccagatatatttctgaaaaagctccagagcctgactgtactgcttctgcttcagaagttctgtatatttttcataatgaaaacgctgaacctccactgccgtatattcttcttccctgatcagcgccttatcattaaaataaaatttctgctgcagacagggctttactcctttttcatagatgtcttttatataagtgaaatctgtaaaaggtctgcttactacaaacaaaatcttttctgcaatctgtccggctctccgggcgctgctctcaatacttaaaagaagctcctcctctgcctttttcttataatttataatgtaacacagagtttcctgctccaaccacagagcctgatatgtgtcaaatccgtcctttttcagcctgtcctgaatcatttcctgaagctgttccatctgacggcggttatttttacatgcttttttcatatctgctgcaagaatccggcagttcagatacggaaagcagtttttcagaccttcctcttccagcgtctctgaatatcctgtaagatatctctccaattgggtactgacatctattttttccttccggtccagctgaaaacccggaataccccgggcagcttttttcagagcgcgaagcagtatctccggattcagcgtaggctttaaaacataatccactgctccgttaagaagggttgtacgaacatattcaaaattatcgtaactgctcaggataatcagtttaatatccggatatttctcctgcagaatcagcgaaaaatcaattccattgagaacaggcatcacaatatcggccagtacaatttccggctgatatttttcaatcatttccagaccttcctgtccattggatgcttcccctacaatctgaaaaccttcctgctcccacaaaagcatatgtttaattccctggcgggtgataaactcatcatcgatcaccagaaccctgcaatatctgctcataatgcatcacagcgtcagcgaacaggatacaaatcccgtacactgacgcttcctttcttttaaatcatttacaaatctttttttattttacactggtttaatacggaatacaacgtccatatttctatcagaagctattctgtactgctcatgtacaggagcaccccagctgtcgtctccgccaactcccatctgcgccgcaagaatacggacccaagtatgatgaggaaccggaagctcctccagatgtgacgcgctgtcaagctgcgctgcgctgtatggaagcacactcatttcaaaaggtctgtcctccgcctcaaagcgcagaccttttccgttgtcgtccattacctccagccagcgcacgcccacacggtttccgcactcctgaggaacaagatagccagacatgtttccttttgccgtatttttgtaaataccaagccttgcgccttccatacggtccacataattttcctccggtccatagccataataacggaaattatgaagggcctctttaaactgccattccataccaaaggcaggcagatccggcagattctttcttcctttataggacgcatgaactgttatggttccatctgcaaaagcacaataggaaacactggattccacttctccggaaacaggcactgcaaacttaaaggtcacagtcacagaattttctctttcctccgcttgcacatcactgaccttctggtactgtccggcgttctgccagtagccgctgtcaaagccaagagcgcagcctctgtcattgtctgtaagggctctccagtaggtgacacggggccgtctggtgataaattcctttccgttgtagcagagagaagcaatccccccctctgttctggaaaacatggctgtaaagttttctccttttactccgatattcacatcaccatgaataatctgaagctttttatccacacaatttttctgctgttctttcattttccacacatactcaccaaaggagacctcaaaacctttttctgcccatattttttcccggctgagaacggcggaaacctgaagtgcatattctcccatctcctcactaagagaatcaagctccggaattgctctgtatttcttttcaagagcattgacctctgttgaaaagtttccttcctttatcacatgaccgtccttcagcagtttccagaaaaactcatattcctctgtggaaataaaattgtttctgttttcaatacacacgccatttctgtcaggggttaatcttacaggagcataaaggtgtttcacttcctgagcctttggagaaattgttctgtctgcgtatacaattccatttgtacagaattcatagtcagaagcgcggtcatcaaaatctccaccataggaaagtacggtttccccaaactcattgacacgctctgcagcctggtcaatgtaatcccagataaatccaccctgatatttctcatatctgtcctcaagatctgtgtacaatttcattccgccgcaggaatttcccatagcgtgcatatattcgcagctgatatagggctttttcggatctgaatccaggtattctgcaatttctgcaggctttgcatacattctggattccatatctgtgctgtccgcatattcacggttccacacacagccctcataatgtaccagtcttgtattgtctctttcgcggaaaaactcagccattgccagaatgtcctctcctgcataggactcgtttccgcaggaccagatcaccacagacggatgatttttgtcacgttccagcatggagcaggctctgtccacaacattttccttccactccggcagactcccgggcacgttccaggaaggatcgcactttcccattttctgccaggaaccatgactttccaggttcgtctcatcaatcagataaattccatattcatcacaaagcctgtaccagagactctgatttggatagtggcttgtacgcactgcattaatgttatgacgcttcataaaacggatatcccagagcatttcctccgccccgatggctctgccctttctgcggtcaaactcatgacggttcacaccccggaacaccatacgctttccgttaataagcataagtccgttcttcatttcaaaacgacggaagcccactgtctctttcaccacttcgatcagcctgccattaccgtcataaatcctcacatacagagtataaagatacggattttccccgctccagggcctcactgttccaacctctcgggccttcacaccttcgctgcccgcagctgttctttccttataaagtacctcacccttatggtcttccagaacaagctcaagctctgcgccctcctcatagcccagaagctcccattctgcggaaaaaacacctttttcatagctgtcatccagctctgcctttacaaaaagatcctgcacatggatcctcggaaccgcgtacacatatacatctctgaaaataccggaaaatctccagaaatcctgatcctcaagccagcttccgctgcatcttttatatacctctactgccagcttattctttttatcctttataaaaggtgtaatgtcaaactcagcaggggtaaagctgtcctcactgtaccctacaaagcttccgttaagccacacatagaaggcagcttccacaccctggaaggaaagaaaaagtttctttcccttcaggctttcttccagttcaaattcctttacatagcttcccacaggattgtattctctggaaatcctgggagggcgaagctcttcctgtccgtcccagggatacatggtgttaatataatgcatatggtcatagccctgggtctggatatgacctggaacctgaatccgtccaaaatgactgatgtcatagccttcccggtaaaaatctttttcccttccgtccggattctcactgtaggaaaagctccattctccgttcagatactggcgcaaaggcattttttctttcagcgaagtttctgtttccttctcatagaaaaaatgatccgaatgtgcttttatgcggtttacctgaaaaattcccggattttcaagccactccaacgatgcttctgttattctcataaactgctgccctccaaatatttctgtttatcatccttttacggaaccggtcatgcctgccacaaactgcttctgcatcaggaaaaagatcaaagcggtaggaacagtagccagcacaactgctgtcatcatcataccataatccggcgtataagaggagcccattgcagaaataacaagaggcagggtccttctctccggagactgcagagcgatcagcggccacagataattgttccagctgttcataaaggttacgataattgccgcagcataggtggatttcatagtcggcataaagatcttaaaaaagatcccaagctctcccacaccgtcgattctggctgcctcgatcagttccttgggaaagctttctgtattctgtctgaaaaagaaaatcagaaatgccgtggagattccgattacaataacagcccccggagtattcagcgcaatggtttttaacagcgggacactgttaaacttgctgaacaaacggaacagaggaaccatcagcgcagcaaaaggaaccatcatggataaaagaataatgttaaacacacgctctctgctttttgatctgtaaataacaaaagcatatcctgctgctgaagaaacgatcatagccagaattgtagtcactacagagattataagagaatttttaaacgcagtggtatactgcaggtctgaactgaggactgcctttaaattctccataaaatagctgcccggcatcagagttccctttgttacatctacagatttatttgttgccgcaataatcatccagaaaaacggaaaaatcgaaacaaaagcacaaatacttaaaaatatatactgaaaagtccgaagcacttttttagtcatttttatcccccactttcatctgaatcatagacaggattacgatcagcacaaccactacataagaaactgcagccgcatagccaaagtcaggtgaatacttaaacagaatattgtaaatatactgagagatcgtaatcgtagcatttgccggaccgccctgcgtgatgttcatagtctcgtcaaacagctgtaaggtaccgatagttgaattaatggttgtaaaaagaatgatcggcttcagcataggaacggtaatactcttaaatttctgccatgctcctgctccgtcgatctcagccgcctcataaatagaatcatcgattccctgaagtccggcaagataaaagatcatgttataaccggtccatctccaggtaatggcaataatgatcagaacctttgcccaaaccggatgagtgatccatgcaatgggttcactgataatattcagattcataagaagcgcatttacaaatccgtctgtagcaaacagacttttaaaaataatagagtatgctacaagggaagttacacatggcaggaagatcgctgtccggaaaaatcccttggctttcagtcccttggtgttcagcatagatgaaatagccagagccagaatgatcatgatcggaacctggatcaccagatacagaagcgtgttggtcagcgcttttcggaatgtaagatcgttaaacaatcgtttataatttacaagtccgttaaaggtaagctgatttcctgccccggtctgaaaagatgtgataaaagcctgaatcatcggataaaatacaaacaaaataataagcgccagaccgggcagcacaaatgtccaggcttttcggttcagctttggactgtagctgcgttttgattttatgtttccactcataatgctcctcctgaaatttcctttttatcggacaaagcagacccgttctcttcgaactccccagattccttaattctcagggaatctgcttctctttgctcgccagatgcagactgccacagacaggcatattccgtatatatccggccgtatccttgcggaagtttttttaccgggaatatttgtacggaatgtactgcttttccgctaaatgagaaagggacaggcaatcacatgcctgcccctcttctgtaccagcatatattagttggcaacagcgccctcaatctgtgtctgatacatctcaagtgtctcatccacatctgcaccgcctacaattgcctgaaccacctctgtcataatatcctcgattgcataggtatcttctccgtaatttacagccggaacctcatttgtccactctgcaaaatccttaaagatttcctgtccgccatagaactcaacacccttgttgtagttttctgcctcgctggaagctttcagtgtgctgacaaggttaatgtcaactgcaagctggttcataagatccacattagatgcaaaggtatctttcaggaatgctttagctgcgtcctcatgacctacatttttcagtacataccagccggcgccgccaatggaagatgcatttacagaagcttcattttctgccattctcgggaatggagctactgcccatttgccgctctgatcctctgcgcctaatacagaaggagaaatccagcatcctgtcggtacagaagcaacttcaccactgttaaatgcgcctacgaactgatcccagtctgcaacctgcttggaaattccggaatcaacaatttttttgtatgtgttgatggcatcctttaatgcctggttatctttaattgtcacgtttccttcagcgtctgtataccatgcgcctgcgctctgaagcatcatacgaatctgtccaaggtcacttggatcaagtgtcagcatatatttgcctgttttttcctgaactgcctggccgatctcaatgtatttgtcccaggtaagatcctgcatatcctctgctgtgtatccggcttcttcaatgtagtctgtgcggtagaaaactgccgctacaccggaatcgaaaggaattccgtacatttttccgtcaacctggtttacacctgttttatactctgcgaaatcatccggagaagcaatatcagagagatctgcgaactcgtccgggtatgcgttcaggtatccctggattctgtagtcctcgatcagtacaatatccggaagaccttcataagagccggaagcaaggcttgtatttaattttgcaacaatatcatcctgagccattgttacaacattcacttccacgtcaggatttgtttctgcatacatttcttttgcaacatttgcagccttgatattaaatgcctcatcccatgcccagattgtaatctcatctgctgctttctcttctgcacttacagtcgcagttgctccaaacaacatggttcctgcaagtaaaaccgctgccagtcttttcagtttcataatttttcctccttaatcacgtttgatccactgttcttttgatgatgctatcttatcatagtttattcaaaaacttttaatagaatcttcaccggaatttggactttatttggatttttggttgctgcaaatgtaaatttggattatttttataaattgggattattttaagattgatctctatacatgaacaaatacaaaattttgaataacaaaatctgtaatatgcgaacataaagaaattctggactctatatatgcatctcataaagacaaaataatgaggatttatacactttttcaaatttcctcaattttgttttccttcgtttcttccctgcctgtcctgatctgtctgtctatgctttccgccggctccggaaaaactatcactttcatttcctgataattcttcaatcatgtcccatatctcacgcatagacatattctgcagttcctccgcagttatatcagagtcaagctcccgcagttccagaaacgccctgtatcttccatgagaaagtcctgcttcgtgagcttgttccacttcctcagaagatgcgtaatagcaatgagtatttttctgagcttccgtgcaggattctatattagataaaatttctgtggactgtacttcattttttcccgcaacggatatagtcatgatctcattgcgagatagtaaagcttcgacttctctgttttccataatacggtcaactgcttctttgtaatccataaacttaatatccagctcatctgccagattttttccatcatcattataaccttccacggaaacaatccggtcaaaacggttgacgcccagctccattgatggattgatgtcgatgctgatttttaccgtgggaataaaataaaactgcctgcctcctaaaaacaaaagaagcaaacatgcagccacagaaagcacgcgtttgtaattcacagcttttgtctgcgtatatccccttgttttataaaaaatatactcactggtactgtgtttcaagccatcctctgcctgtacctggtcaaaagcctgttttattttttcacgcatctacatcacctcccggcttttcccgcagcaggtgcctggaacgagtcatcaaagtataaactgtatttacattcttttttaaaagtctgccaatttccggtgctgtatacccttcataataatgcagataaacaacatccctgtattttgagggaagtgataaaacggcctccaaaacctccttgttttcctcctgcatatccgcagcctgctccaaaatctcgtccagagaagtaatacgactgcggaaaaagcttttcagcagatctttacaggcattaatggtcacgcggatgaaccatgccttttcatgctctttattttcaaacacaacagaactaaggacatattttaaaaacactgtttgaaatatgtcctcagtatccgcatagtttttcaaatgtatcatacagagacggcgtatcatatccgaatattcctccaccgccctgtttacttcctgttcattccgcatgaaaaatcacctgttattttttgtttctgccgcagaagcctctccttccacctgagcttttttttgctgtgcgattgtcacagattccgtcattatcgacatctgtatagttttgtccgttgctccctcttccacaacggcagtcccttgaatctgtattacagttgtcgcagattccgtcattatcggtgtctgtatagttttgtccattgttctctcttccacagagacaatttcttgaagctacgtggcagttgtcacagattccatcgttgtcggtatctgtatagttttgtccgttgttctctcttccacagagacagtctcttgaaactgtgtcacaattatcacaaattccgtcattattggtatccataaatcttttgccatttatgttctggcagaaattctcttctgcacatacactgcgatttccgcaaataccatcatttccgatatttctgtggtgtccgccacccctgtggcttcctgcaaaagccatagctgttccaataaataataccattcctgctgcaaaaataccaagcattgtttttttaatcctttttttcataaataagttcctccttaatctcattatggaatattacctgttcatctataatacgattaaaaagggaaaatccattcatttcaggattgtttatttcacataacatatttccacataacagaaaaaccccggaaaccttacggttccggggtaatcttacgcttggacacaaagttatcttacgataacactatatataatttatctattctattcgcagtacacctcgattccgctacgcttcatctcggtcgggcattcgccctgtaagtccttcgtcaaatatcctcatacgagtaaactcgcatcggatattttcctcgtccctacactgctcattgcttatcgaatattactcgataactgtagcaacacggcctgatcctacagtacgtccgccttcacgatactttaatcccgttttacctcatattttttatggttttctctccaaaatacagtgaaaaacggctgaattgcaccacctattttgatttgcctgatttcttggcaccgttttggcaccgttttggcaccggagaatactcaaaccgattctcttctgtagatactagatacttctctaccaactttatattgcaccggtaatttttaactgttataatcgaaacatgggtgctaccataacggtaggcggttagtccttcaacagagggttgcagagtgccagtggcactcgttttgcaacgaccgaagtgaaacggagacctgtgaccctctgattacatagaaacccgaaagggaatccactggaaaggagggctaagccaatgagtattgttgacttcatagcagtagtgagcttcggcttaacctgctttagtatcggatatacattaggcaaagataatcataaaccacaaaaataaccgccctggtctggtaaactaagcggttatctttgatagatattctaaatagtaaaacggactaaccgtctatcggtagcactctttttctataatcatattagcacgcatctgtggaaatgtcaaaaagttctttttccatagtatgtaatacgaatttgaaaatacttataagcccaaaaaatacaccagtaccagcttggtcacagcagctccgccaaaagcaacaactgcagttacaactaattgcataggttttgggaaattttcgaacacaaaaactttcctactcttgctccgcaccttgcttaaagatcctgtcgtaaatgctgccatcattatgactgacacagataccaaggtctcacaatagccggcaagctttcctaacacatcattatacatatatgcacctgtttcatgcagaatccagtatagaaccaatgcacaaactcccatgacactttggagcttcatttccttaaaaatcttctctttctctgtagttgcataatctgacattgttttagcaatttttctttcttcttcgttcatcatctcgcttttcctttctccactgataatctcaggaatgctgatatcataataatctgcaatatccacaagaatactgatatccggcatattgtttccggtttcccatctggatacggtccttccagagacatttaatatttctgccaactgctcctgtgtaatgcctttttctttgcgaagtttttttaaaaaattcccgatttttacttggtccacctcaactcctcctttcatcatcaaatatagaatctgttatctgcaaataacacgacacaaagcgagaaatgtcgtattttcactaatagacacagttgtctatgcgtttttcattttttcaattatacagtcgagtagactaaagccttgcaactttagcccctcacagatccgtacgtgcggctttcccgcatacggctcctcataataacattcactttaatataagcaatagtacgtctttggtttcgtaagcggataacactttagcatttcccaaaaaccaccccatgtataggctcttctgcaacctcgacgatttaccgctttaaacaggaattgttgtactctatgtaagaatgcacataatcttctataattccatgttactccataatagcgatagtgacctacaagctttacattcagctcttttatgatttctctgaccggacggttccgattatcatatatccatagtttatattctttcagcttacgttcaaacttctttcgagatgtctgcaactttaatgcaaatgttccctttctcgtttttccgcaatagaaagtaaaacctagaaaatcgaatgcttctggcttacctattcctctggatagtctgttggtttctgcaaatctcccaaattcaatcaacctgcttttactgctttccagctcaagattgaattgttccatcctctctttcagggctgaataataccactctgcttctgatttatactggaatccagctacaaaatcatctgcaaaattcaccagaaaacagtctccttttaacgtctttttcaccacaaatttaaaccacagcgttaacacgttatgcatgcagtgtgtagcttaatccattgctttcatcataaatgtgctttttcatcgtcttatctctccattcctctgttttgtgttttatttttcttacgctgttgattctccatttcactctttcgggcaccccaggccaatctttcgtgaatacttcctttgggcatttgctccatttgtcttttttcttctaacgctttctgctctcgtatatcttgctgtaccgcatcctctacaacattttccccaagaacacgcactacccggtcatatctgtcggaaacaccctgcaattcttgtttttcctcagataactgctgtttttcttcacgcactgtatctaacgctctctgcactcggttatatgcctgcttgatttcctgatatttgtgtttccaattttctacttcttttgtaagttctttgacctgggcagccattgcagcaattttatttttcatttgggtaaacagtggttttatttttttatcccggtaagttgctgcacgttctaatgcaccagcttccggaagtaaagtctttactgtcccatattcctttatttctttgctgacattatccattaccggttgtaaccgctctctacgttcttccagattgtgcagatctttctcagctttttccacacgcttctcagcctcctctttatctttaactgcctgctcctcatcatcttttaaaagctggatatcagctcttacttccgcaatctgtgcaatcagtccttcattctcagcagtgagatattctttttcctgttccagtgtctgtacttcctttttacgctctttcttcttaaaattataaacatcaagatgctcctcatgtgtccctttctgctcccattcaattccatgctgtcgtgcaacctctgcaagcacttctttttcatggttgatccactgattcaactctgtatcgtgtttgttcccgccttgaaatcccaggctttttaatgcctgcttcagtgaaaccctggtatccattcctttccctttccagccagttacataaggaacaaaatcaatatgcagatgcggtgtagcttcatcctggtgcagataacagctaaatacatgaagtgttggatttcgttgctgaaaattctttacatactcatccagtacttttaccgccaggtctccttctgtcgttcccacagccatatcttctcgatttccaatctggaaaatcacttcatggaacagcttttcctgctttccctgacgaattttttcatagtaatttgtaatctgccggtcctttctttttcccacattgtaccgttccacagaatcatcaaacaactctttatatacttctttcagattttcattctggtaacagatattcaggtgtactctgtctgggtctacattttcagctacaaaatcccgtctgttatgagccagcgatccagctccaatcatgccgctgatcgttcttctcatcattatgctcctcacctctccttctaaaaagcgtgccagatatggcacataatttgtatttccgccaactatggcgattataagaaatcttcgccggatacggcggttttgttacttttgtcaaaagtaacgcaaaagcactttcgacagccgtaccgtccatcaaaagtacccttgcgccctgccgggggctatttctcctgcggtatgtatccgcatatcctattccggtattctcgcccagatatattccaaatctccgcagtacggtgttcctaccagataccattcccttgccggattcatctccattctggtctgaacccactgatcatcaatcagtacttccaggcattccccacaatgaaatcctgtatcaatccataaatctgatgacaataaaccatatctgtcattactgctgttataacctaatcttccttctctcattgctgtatgctcctttctattgtcctactgtaaggacgccctgattcagggctccctttcgcaacctataatttacctataaacaatcgggtaatctataacctctcgtctgtatcttaccggctttcgccttgtctgatatttacaggtgcgtgacacgctcctgttataaagtgatcagcaagaatctctaccaacgaaagttttccggtattcccttcctttccaggtattcctgcctggacttttctctttcttcctctgttagtgctgttttgtacctgctgtatagctcccgatctatcattgcattcagtttcttttctaatcctttccttattctttcttcgccctcgtaattctccatcaaaaaatattgcaaaatctgaaagaataactcatatggaatctgcacatttctatttttcatctgatctcctttcaaggtggcaagatgccctattcttaaaatatggtcatcttgccatcttccttttctactctgacaacatccaataccactgatttccacgttttacggaatctattcccagttccatttttgcatttctcagtgttttctttttaattcccagtttttctgcttcttcctcaattttcttttgtgatttcattcatttttcttgttccaaaataaggaacaatgtgtttgttcatcatgtgctgcttattccggattgaattttctttcaattcttttctcttgtcttcaaaataaacttcgatgaaacttcccatctccattttcatatccgctgcagtctttcttatgaattccttttcataattcaatgcttctttctttgtcttgaaccctcttttcagcttctgtgttttctttcctgtccagtcaatataacggaagcttacataccaggttccctgtgttttgtccttgtaagctggcatctaaaaacctccttcatactgctctctgagagcatccataaaattttgtttcccagtagggacgtggaatcttccacgaactgctacatatccttcctttgccagttcatcattgaactacttcagaatagaatatgctttactgcgtttcacacctaattcttccatgacatcatcaacagtcatcatataattagttctcatattgtcctcctttccaatcacttttgtgactcttttgatgttttctactataattcacttttgtgctagaatagaattacaaatattattaaggaggcagcattatggtaggtaaaaaaatccgggcattcagggaatttagaggatacagtcagatacagttagccgagctgtccggcattaacgtaggtacgatcagaaaatatgaacttggaatccggaatccaaaaccggatcagttagaaaagatagcaactgcactgggattaaatgtaagtgtttttctggattttaatattgaaacagtcggagatgtactctctctgttgttttctattgatgattcagtgaacctctcacttgctgaaacacctgatcagaaggttgcgctgacattcaataatcctacaatgcaggactttttcaggaaatggtgtcaatttaaaaatgtctatgaaaaggaaaaaactgaaatattagctattgaagatgctgataaaagacaggaagaactggataagctgaacgctacacaggaagaatggaaattacgtgcaatgggaaccacgataggttgtcatactgtaatcaaaaagggaaccgaaggaaatgagattaaaacgtataatctgacttaattttttgcaaaataaaagagcccttttgagctcggaacttttggtggtctgggtgggagtctgcttagtatgttaaaccgtgcaaccattacacctcaccatcgcatactcccagaccaaataataatatatattcttttctcatcgaatcaagtcctttcttgcaaatatgtttaactgcatcataaatcaatccagaaactaggcaattcgacaatgctcccaatattggtttgatggtgtttggaatcgaaccaaatcctgttactaactgtgttatatttatattgtaccaagccgctagcgcggcggctagccctaagtacgtgaaaccactacttttttcttaaaatttcattttttagaaaataaaagtagcagtttttttatatatgttttattgttgaatcaccacaagacaacctaaaacaatacaagaaaactgctatgcttatgttaccatggatttttaaactcaacaaccacatatttcaattttatatatttttttatcgtcctcctcctgaaaataggaccgttcgtatttttccaaatatttcattctatttcaggaggttctattatggacgattatttaaaacagtaccgggagatgatctccctccgtggtcttaccgaccataccctcacagcttattccacctacatctccgcttacctgggatatctctctgatatcctcggcaaatccccggaggaggtttcctgggccgaactgcgggattttatccgctggcttcaaaaggaacggcagctctctgaccgtaccgtcaatgcctgtatttcccagctgcgtttttttaccacttatgtcctgcgcaggacctgggatccgtaccagcttccattccggaagtttgattcctatctgccttttgttcccaccaggcaggaaatgcagaccttcctttctacaattacagacccgaaattcaaagcacttctctgcctgatgttttcttccggtctgcgcattggggaagtacgccatttaaaatgccgtgatattgaacattccaacggaaggatcctcatccgttcttccaaaagccgttcttccagatacgcccagctctctgagaccgcctggcagctcatcctccggtactggtattccctgcccgggcaggaccggccccgggatttccttttcccacagaaaagggatccttccaggcccatcgaccaccagcgtatcccggattacatccgttcccacgagaaggaactgggatgggaacaccgctttacctgccatactttccggcatgcttttgccacttatcattatgaggacgggacggacctgcttaccctcaaagcccttatgggacataaaagcatcaattccactgccatctacgtccacctttcttctggggctttttcttcttccccaagcccctttgaaaagatgggagggatgctggatgaataacccgaagatccgaagtatctcggaaaactcctatcaggatttcctggaccagggatcccgtccctcttttgtacagcagaaagcttccaggtccatcctttcctgcaagtccggggcactggggatcaacatttcccagtgtccggactgcggacaccttgaattccacaacaattcctaccggaaccgtaactgccccaactgtcaggcggtaaacaaggagatctgggtggataagcgccgggcggaagtcatcgacgcctcctacttccatgtggtctttacacttccacatgaacttaatcccctgctctactgtaaccagcagcttctctatacactcctgcacagatgctacgcccagacacttttagagctctctgctgataaaaagtggctcggtgcaacacccgggatcatccaggtactccatacctggaaccaggaactggattaccatgtacatatgcactgtattatttccggcggcggccttacaccggagcataagatacgggtatcggaaaagaagttttttatcccagccggcgtcctcagggataaatttaaaggaaaatatcttgccgggctggattccctttataaagagcagcagcttgtgttttcctcttcctgcgaaaagctccggaattcctatgaatggtcggaattccgggacaacctgtaccgtaaggaatggtgtccctatatcaaagaaacttttaacggttttggcaacgcgatcgagtatcttggcaggtatacccataaagttgccatctcaaacagccgtatcctgtctgttgatgacaggaaagtaacattttcagcccgagggaaagctcccggagaaccacgcaggactgtcactctggacaatacggaattcatccgcaggtatctgatgcatgtgcttcctgacggcttccaaaagatccgctattacggcttcctgaataaccggtacaagagtaaaaacctgaaactaatctttactctgcaggggcatcagcgtttccatgccagatacacaggactctccatggctgaattgctaaaagcagtctggaaagtggatatctgcatctgcccggaatgtggctgccaacgcatgcagcacataggaaagacatatggtacttcctgacctgcaactgtttctgctaaatatttctttaacaagcctccggaagaaggctttaaaagcatgccttttttcaaaaatggcttccaggttatcatgattatcattagaaacacctgcatcccggcttccatttacgacaatttcaccagatgaaaagaatactttccccatatacatcctggctatcagtccgcggcttggtacaattttgaagaatcacatttagagcagttctgcttttgttcagaactgctcttttctgactgctctgaatatgatacttcacttaagaattatagcaaaaaaacagggaattctcaatttttccgcctgcagacctccatggattacattacacaaggcgattttccggttctcttccacgaaggacatccaatacaattttcgcagtcacacacgatgttgtctcacagttttcgtaggtttccgccgatgtatgcggtgtcataatcactctgtcacttgacagcagtggattctctctggtaatcggttccctcgcatagacatccgtagcaaaacctgctatttttcccgtccggatcgcctcagccacatccttttcttttacaagacttcctctcgcagtgtttacgagatatacaccgtttttcatctttgtgatgttttgcgaattgatgattccaatcgtttccggaacagcgggcagattcacggaaatcacatcacttcttttcagcacttcctcaaaagacaccatttccactcccagacgttccgcttctttttcatccacatatttgtcatatgcaatcagaacaggagaaaaaactttcagtttttcacagatattccgcccgattgaaccaaatcccagtataccgactgtacagcttttgagttcatgcatcataatacgcggccattttccttcttttgtttctttatttaaccatacgatctgcctggttaatcccagaatcagagccactgcctgttctgcgactgccgtcgtattaattcccggacaattgcaaactgtaattccatacttttttgccgcttccaggtcaaaattatccactcctactccgaatcgaacaagcaccttcattttaagtgccgccctgaatatctgttcactccagacatccgcaccggcaattgcaccgtccacatcccctaccagctcttccagctcctcagcagtaaacggacggccggacgtattctcaataatttcacagcctgcatcctgcagaattctttttccggcctgacagtatttggaataattggtcacagtaactaagattttcatttttcttcattcctttcctctttcagagattctgatcatactgcagcgttgctcaatcacataatttctcattttgacagattccaagatattttttcatatcttctgtcaggcggatcagctgatccacctccagacgtccggtatcattcagcaatgccggatcttttgtgcgtgtctgcagcgaacggaagttatgaatcgttttatgaaaatacttcgcgttgacaggataaatctgacgctcaatcaaagaagccactgtaagaaaatctgcaagtctgcgggctttttccggctccttttccgcattttccaccagccatacataaagttccggatggaaattcgccattacgccgctgaaccccgctgctcccagatgcagcgtttccagcaaagtggacgtgttcgcattaaataaaaggactgtgcttccgcggataatatccagttttttctgtatatcatcgaggctgcagctggtatcctttataaaatagaacctggaagttgcagcacaccatgccagttcttccggcgtaatcagccttttataaggatacgggcattcataaaatcccagtggaagttcctccggaagcgcgtccatcaccttccggagattattcatccacacatcatcatcttcctctttttttgccaatcggtttgtgattaaaatcagcgcatcaattcctgtctccgccattttctgaagctcagtgatctggtcttcaactgcttccgaaacatgccctgatgcaacaacgggtactcttcccgcagccgcttttacaacaaattccgcaattttcagacgctcctccagagacagaaaaaacatttcactggactgacaatctgcaaataatccatccactcccttttcaatataccagtccaccagtctcccaagcgattcataatccacctgatcatcttctgtaaagggagtcagcataaccggataaacccctctattaaatgacctcattctctttcctcctctgttctgaaattcccgctgttcacacagcagaaccgggatttcatccggaatatttttttatataacgacacatcctgcgaataccttcacacagcgcggtcatctctgttccgcaggaaatgcggaccatctgtcgggatgattccccaaatgttcctcccggcgctaccgccacatgttcatccgccagaagtttcaatgcaaatttctccgaatccatgcgacagcaggagatatctgccatcatataaaaagcaccgtgaggaaaataaaaatccacattttcttccctgaatacagcggctgccgcatcccgtctcttcttatagtctctgcgtgaaatttctacaaaatcctgaggaccggtgattgccgcttctgctgctttctgcgcaactgcagtagcatttccgatcattggaaccatcagctgcttcatcaaagaaatgatttcttctgacgcaatcgcatatccgattctccatcctgtcatcgcgtactttttagatacacccgaaatcaatatgactctcccgtcctgatccagggatttcagagaaatatgttttccctcataaatcagataatcatatacttcgtcagaaattacatacaggtcatattttctcgccagatccagaatcatccggatcgtttcctcatgaaaaacagcaccagtcggattggaaggcgtgtttaccacaatcgcttttgttttctctgtaatcaatggttctatattttcccgccccggctcaaatcctttatctgccggcatgatatacggaaccggctttaaactgtttgacatcacctgcatagtatagacaggccagccaggatccggaatgagcacttcatctccgggattgcccagacatcccagaacaatatccagtgccatcgtagcgccggcagtaacaacaatctgcccggtgttcacatcaatgcccaatctctccgaaaaatcttcggccaatgcattccttagtgactgaattcccggtacagacgtatacttggtaaatccctcgtccattgccctggcagccgcttcacagatataatcaggtgttttgaaatcaggttcccctgtttccagtctgatcgcatccggtatttctctggctgcttcctgcagttttcgaattcctgactgtggcagattttttacaattctggataattctttcattacttttctctcctgcactttaaaatcggagcctttaacagccctgtcggttttaactgatattcgtatgaccattcatcgtccaccgtgcgccatgcattcggaccataccatatttcttcctgattgcagttatgtacacacccaaaagtattaattctgctgccgtacacggtaacggatacaatatgttctccttccggaactatccccagactgcatctataaggagagaaggcaattctccccatttttcttccgtcaagttccacacaaatgcagggagaacggaacatgtcagcttctatttcgtattccccaccttccgaatagaagggaatttcatatgtcacattcccaccataaaaaggatatccctgtctggtaatttctccaaatgccaaaacccttcccggtgctttcagagtctgacagattccccggacttccacaataaactctcccagaagaaatatattttcaacgttcgttctgctgttatatggaatctccacctgcagaacatgtttcccctctgtcagaaccgggagcgggacagtgcggatgcatcggtctgtataccatccatcctccttattgataatttcatatccatccagaaaaagcattgtctccgttccgttttccattgccacatgacatccttccaggtcgcaggtgcattccaccgtatatttcagagaaagcctgtgttctgtcggttcctccacatttcttgtccacggctgggcaaatgcttccatgcgcagcgggtagccaagttttttccggaaaagattgtcaattctgaggatttcctccttctcctgccattttccattgtcaaaacggtattccgcgatatccagaaggcaaacattcggctcggatagtcttaccggattcacatccggcagcggaagtattctccagcagtctgtttccatggtctttcttctgtttacagatttcttccctctgtctgcatcggtatctgttttacctgtgcagctttccaaatgaaggaggagggaatcctggtcatacattgttctgtacaaaacagtatttccacacttccaggtataatccggctgaaagatttctccggtcagtgtatcataaatcatgactttccattttccgcgaattgtaaccgtcagttcttctttcaccggaagatccacatttctccggcggatcagggaaccactattgtcaaatattgcgctttccggactctctgtacgatttacatgagccagaaacagccagcgatcatcctcctcttccctcatctgataaataatattggtactggccgtcccgtctgcttctctgatttcaatttcacgcaaatcctccaaagctttcagaatctgcagacgtccgaaaggaatcacgtctgttttttccgcaagcttccttcctctgtctgatggacgcgcattttcaagatacgggatctctcctgtaaaaatcacgcggccgccctgctgtttaaatttttccaatatattcagtgttgtacttcgaagcgtatggcagtttgaaaccagaaccgcatcgtattccatttctcccactttcaaccgaggaaagctgcttcctgtgtcttccgtctgtccggtcagcaagggcagaagggattcacagaggaaatcaaaatctattgtgttatatagcagccattctgtcagatgccggaaattcgcatccatttcctctcgtataccggatgtctggttctttggcccccagtacagccagtaggattctatcggatggatcacacccagacggacaagaggctttcctctggtcatcgccgtattcactctcgcaaagtgatcctccagataagagtattcgcgataccagggtgactgactgccaatagatgccggataatctctcttggcttccccggccatggaagtccaggtcagatgtggtacacgcacagtcactcccaacgcggcctgccagtccccctgcagcttatgcccgcgaaaatcaaagtcccagtttgtcacaccgtacagctcactgagcattgcctctctcccgaattgatggactgcactttcacattgtttcgcagtattcagttctctgcggtcacagagcatatcaatccccggaatatcaaaggaacggtatgagcgcatggcttctccaagagcagctgtctgtgacttaagagtaggctcctccatcatatgtcctgtcagtgcaataccgtgcttccggcaccatccgccgatctgatccgcaaaagcactggcaaatctctccgcaatgtggtcatgatactcataacgaatgacggaaacctgattctccggaagctcccagaacagttccggaagatgtccgagaagactgtgtccgtattcatttgaaaaactttcttccagatcatcagtaaatggaatgatcacatcttttttctgctccgcatagtccagacagcgtttatggcagaactgcggctcatctgtgaagattgccggaacattcccgccaaactgttctcccaaaagtccggcatatttctcatgcgtcacttcaataaacctgcggactgcagccggatccaatgtgttcagataagcctggtcattgaaccatggattgtctcccgaaacttccagataagcaaaccactcatcccagccggcccttgcgttctcttcttccttcagtatcgcatattctctgaggcaaccgttttccagccgaatctgataccttgcaagccgaatgcgttcattgctccgaacgacctgtccgctggttttcttttcgcttttcacaatttttccgtcctgacactccggcgtaaaaagaaggaaacggatccgatatcgatgctcccgggtaaccaggccgcctcctgcacccgacggccaccgatcctcatcataaagccaggtcagcatctgtttttcattaaatttttcatttgcatattttaccagcctgagaaattcttcgcccatataggggtgatccattccggttcgacagtggatatgtccgccgcccattcccatatccttcagcgaatcgatggtatcatcaatattctctttattcatccggcagttccaggcccaaaacggcgctccccggtattcactgccgggattacgaaatacttcagctgtcaatttgtctgtttttttatatagcatcgttctactcccttccggtattttcacagcaaaacattatcctttcactgatcctgcaaccatgccggcaacaattttcttgttaaacagaataaagagaatcagcatgggaatcgtaatcaggatgatattggcaaacaacaggttatagctgcttgcaaactgtcctttataattatataaagtcagctgaacagtagtgttttctgctcccggcaaaaaatagagaggattagtaaaatcattgaaggttgtaaccgcagtgagaataataaccgtagcacggatcggtttcagcagaggattgataatctgcaggaacacctgaaaaggactgcacccgtcgattcttgccgcttcttccagttcagtcggtatagatgccatatacccacggaacagcataatggtaaacggcgtctgaagggcaatttccaccattaccattccaaacatagtcctgtaaatatgcagtttctgaagaaggttgatcgtcggcagaatcgctgcaggaatcatcaggccaagcataatgatcgaagatacaattttcatcacacggtcgctgcgcctctgtatcacatatcctgccatagcaccggtcacaatcagtccgattacggtaaataccgtcaaaagcagactgtttttaaatgccgtcagaagctgataattcgaatacgaaaatacttccagataattttccaaatgcagctccgtgggccatgcaatcgtcagcagatttgcttcctgctgtgacttcagtgaattcacaaacataaaataaaacggtataataaaaataatcaccgttagagccacaccgacaatttctccaatcaacagcagctttctgtgttttttcattattggatcgcctcctctcttttcataagaaaatgctgaagcggaaaagcaatacaggaaatcagcacaagcatgatcacgttgcccgcagtggacagtccgtaaaaaccataggcgtactctttgtaaatcactgatgccataacgtccgtcgcaaatcccggaccaccgcctgtcatagcccatatcaggtcaaaagaacgaagaccgccgatcagtgacaaaataatgattgaattctgagagggcgcgatcagtggaagcgtgatattcttcagtttctgccacccgttagcaccgtcaatagaggctgcctcataatatgtccggtcaatagactgcacaccggcaatataaattacgaccgaaacagaaagacctttccacacatctgtcgcaataacactgtataaggcaagattcatatcacccagaaaattcaccggtgaaaaaccgatcgcctgcaggacaatgttaaacaggccttttgtgggatgcatcaaagcggaaaaggtaagaccaaccgccatcgtggaaacaagattcgggaaaaaaaccgcagaacgtataaagccttttgcccgaatcccgctgcacagaaacaccgcaataaaaaaagcgatcacaacctttaatgcgctggtcagaaatgcgtaaatcagtgtatgtacaatcgaagaactcagagaattttccgaaaaaaacattttataattgtcaagcccgcaaaaagtagccgtattaaagtcccatactgtcatactataataaagagaagacagaatcggaaacagaaagaaaacgcagaaaataaccagagatggaactataaaccagaaggagtataatttattatggtttctttttgccttcataatgacctccttaaaaagaactgaccgaccgcctgagcagtcggccagaaattcatcagctgcagatcacaggttattcccatccaagtccctgctgaactgctgatttcttgcagtcctcatcgtacatctgtgcagctgtctcggcatctacctgaccaaaagctgccgaagtagtaatctgttcgcaggtagctccttttatcggtgtaaggaactcaagtgccggagctgtttttccctcatcaaagtacgcctgcatgtcctcacggattgctggagccacactgtcagggagagtatatcctttgatacaggacggcccgttcgcgccgtaattatttacatacagatcctggctctcctgctgacaccagaagtcaagaaatgcgagagctgcttctgtattctcgctgtctttgtttacataccagctgttcggttcccagaccgtaaggcccacatcttcaggatcatctccgggaatcgcaaatacaccaatattctcttttgcttccggatgcgcggaaatcatcagcggaatcacagaagttaatataatccagtgtgtagcctgtccggtagccatagcttcaagaccgtcttcgtatgtggccgccgtataatccggctggtacatatccaccagatccgcatatttctcccagcttgcaagcgccgcttcatctgtcgcaaatttcgcggttcctgcagtaaagtcctctgcaaaagtcggattctgagccagaacattgtaattatcaccgaggaaaagaacctgtgtagtccaggtatcaccggcggaaagatataccggatattttcccgcatccttcaacgcctggcaattcgcaagaaattcatcccacgttttcggaacttccagacccagctcctcataatccggcttccagtaaacaacggcgcccgcagaggtagtggtaaccggagttccataaactcgtccatcctgacttactgtactgatgtatgcatcatcgaatttcttcgtaaattcctcatctttaatatccaggaaatgttctttcggattcagcgcggtaaacagagatcctgaattgtagacactgagatctgaaagatctccggatgcacatcttgtcttaataatattgtcgccttccgttccttccggattgatctcaacttcaaattccatacccagctcttctgttgccttctccagaattgccttggttccatcgtgatacagagaggtgccgatccacatactcagtgtaacaccctcataaggcttctccgcctcttctgcaaatacagctgccggtactgtacccactgtcattgctgccgccaatgccactgccaatacttttttcttcatttttacatctccttttcttcttcattccagtaattcgttttcggttttcatgtgtttattatacaaagacagaatctgcaggaacatagaatttccaaaacttccggatggaaaataaaaactttttctttttaaatttgggcactataacaactgatatttttcaaaataacaaacgagagggtctcactttttgtacgcacagtacgagataaaaagtgctgtttacacagtaagcttccgctctttcttacacaaccggtatcagagcaaactcacaaaaaccaacgtgctttctgcattttacattataaattcccatcatcgctctcatatagcaccctatcttccttggtatttctcctgccggctgcaattttacgcccctgtcagaacccggttcaaaatatcggcaaacggctccatagcgtttttgacctcctgcacagtattggtctgagcccccgcttccagaaggagggcccggggtcttaaatgaaggttatatctcagggccgccagataaattcccctgtacaattccggataatattgggccgcctggtattcaagctgaaaagaaaaagccagattatcctgtatgtatggattgggcagataatctacctgaccgccgtcggccgtataactcagcccattataaaacataatctgagctgtgggttttccgtttatctccgtaacaagatgcctgtcttccggcactccgtccctgtgaagatcgatcaccacttctatggaaggattttcttccaggatctgttctatatagggacgcgcatagtcataggccgcgctcctgtctatctgcccatctacaatatcgaaggtttccgtcacatgaatcacctgatatccgtaggtttccgtcaaaagctgagtcagataatcacccacacctacgatcgtatcctccaccctgccttcccgggaatccacgaaggtttcctgggaatggctgtgataaataagaatctgaggcacatccgcatttttctcgagggtaagatctttcccgagaaaagaagccgcgtttagctgctgttcactggtagctgttttgggatcaacaataaaaaaattatttaaaagataattgtaatcggcaagagtttccggcgccaggtctatttccggatggggcagcgctgcggcggaggcggcctgcgccgcagatgtatcttctgtttccgataaactctgttcatttttttccttaatttccttatctgaggcggagggagacggctgcttcgtctcctccgtccgggtttccgattctctctccccgctttcttctccggctttgtctttctgcgcagagttctccgtatttttctcactgtccgcttcctgcgcgtctgctccggtctgactttcttcttccttctcttcagaaatctccggtactgtttccggattttccaactgcctgtatatcattagcgtactcttcccttttaagtaccccataaattttgaaatactatacttgggtggaatggctacgcttaaatgtatatgatcttcgcataccgcgccatctataatctctacatctttatatctgcataatgtagaaattatatctcttacatctgcttttaactttccatacagtactttctttctgtatttcggaataaaaacgatatggtattggcatttccagcgcacgtgtgataaactcttattgtccatttgggaccgcctcctatactaagttttgagtttggcttgcgacaccattctcattttagcataggaggctttttattattatcttacacgctcctgcttactccattctccccagcatagctgggggattaggcttttcatttacggacagcagatttacgcacatggaataacttccatatttacgctgttgatggaagcacaatacagattccagaatcaaaagagaattacgaggtgtttggaggcaacccaaacaagacagaaatagtgtccccccttgcttccgcatccattctttatgatgtgttgaatgatattctggttgacgtttctcttcatccctatcgttacaatgaacgggaatcggccaaatcccacgtggattttttgcccgggttttcaaacagcgtcatactttttgacaggggatacccttccgaggacatgtttcgctatctaaactccaaaggagtcctgtttgttatgcgtacgccaaaaacatttaagaaagccatggcagaacagaacgacgctttatttacatatcccgcttcccgtgataaagaggcccttactttaaggagcgttcactttttgctggaagacggcagcaccgaatatctggtgacaaatctaacgcccgaacagatggctgcggagaattttccggatttataccggctgcgctggggagttgaaagcaaatacagggagcttaagaaccggcttgaaatagaagcatttaacagcgttaaacctgtcagtatccggcaggagttctttgcagcgatgtatttatccaatctggctgcgatcataaaatcggaggcggattcaaggatcattgtgtctgccgacaacaggtgtgattaccagtctaaccgcagctatatattaaaccggataaaaagctgtatcatacgtcttttgcggtcgtccttgtccatatgcaacgagatgatatgccggatagtggaagaatcttccaaaatatattccattatccgccccgatagaaagtttggcagataccgaaaacatacacgccggagatattacagccatatgaaaagctgtatttaaataagaccacaacaagaaggatataggactgtttaaaaatcagcagtcctatttgtgatgcgattatttgtaacaatacactcaattacgtggtatcatgctgctttttttgaagcaaatactcttaagttgacgacattgcccgcatagcgggtggattatatttcgcacgtttccgtttctctgttgagaaactccaacgtactcaactgggtctatccgacccatattataaaaaggtggcccgcggattttccgcgtccaccttacaaaacacaatttataaaccactaacggctacttattttttagctatgcaatatcgaaaaatcacaaatttattttacgacaaaagatctatactttcctcctcatctgcgatttcctttaaaaattcagacgggctttttcctgtataggaccggaaaagtctgctgaaataaaactgatcttcgtatcccaccatcgccgcaacgtctttaataaaactgtccggcttctcacgaaacagttcttttgcccgattcatgcgcagttctgtcaaatgctggctaaacgaattgcctgaatattttcgaaacagacggctcatatatggctgagaaataccgaactgatggcaaagctccatcagcatgatcggttttcccagattaagttttaaatagtgctcaattttatcaaaatattcctgcgaatccgctttgccttcttccagctcttctctttgaaaattcaaaaaaatatccatcagactgtctgtcagcatcttgacagaaaccgcatagaaaaaagcatcactcaacagatattcactttccggcacggatattctgctgagcccgttttgtctcattaccgccatgatttctctggtaaaattttccatccacagctgtgatggccggtatttttccagcgcactgtaccctttccggatctcagacctgatccggcctgctttctttgttcttgcagcggcttccagctccatcatgatattttcctcaagttcgcgcagctctcttgcctgctgtccggaaatttccagcggttctgccagattcacgcactgtgttattcctacactgctgcgcaaatccagctcctgatacattttccgtatcttctcctgcaattcatttacggaaaatggtctgctgtcatagatcagggtataataatccggttctttccgttgtttctggattttctccatataacgcagaaagtctctctctgataacaacttcttcggaatcagatacagagcttccatctcatcccgtccgaaaatcagaaactgttcattgatatccgaatatatttctctcgttttatccatggcaaaccggcgcggaagtccgtttgtccgtaaaattgccccataatactgcctgtaaggtatatagcgtttcagcttctgcatatccgcttttttcccatttccgattgtccacagaatccggttgcactctgtataatggattttcctgatttttactgccgcatgttccagtgagttcaaaagagctgaaggcacaattggtttcagaagataatcggtcacaccggaacgtatcgcactctgtgcatattcaaagtcctgataaccgctgacaattataaaacaaatctcaggaaattcctttcgtataatcgcagccagctccactccggataaaagcggcattttaatatcacatataacaagatccggcacatactcccgaattttctgcagagcctcctgcccgttttctgcagttgccgcgattttataattctcacatcgctgttcaataatcaaacagacagactttaatgcaagcggttcatcgtccgccaccaacacccgatattccatcctcgcttctcctgttcagccattctccaaccgttacctctactcctcctgacggaagattccgtatagaaaagatcaatgcatcgtgatacagcaaaaagcatctggcatatgtgtttaccagccccatacctccgatttccatttccatccctccgcggttctccaggtttttgcgcacattcttaatcttttcccggatttcccttagtttttcttcactaatgccctctccgttatcctgcacccgaatctcccaatggtcagaatacatggttccactcacctgtattatcattctcctgtcagaatgaccgtatgcatgagccagaatattttccacgaactgatgcagtgtcattttcggaagcagcttatctctgaccgcagaatctatagagacgtcaaaggatattttatctccataacgcgccctcagcagatacagataattttccagataattcatttcctgctctgtcttcacataccgttctttattgtttgttgaataccgcagcatactggccaatgctccgcacatgtcgcagatcatatcatcgttattttcaattccgcgtccggaaatgatgttcagcacattataaagaaaatgaggattgatctgtgcctgaagcgcatcaaactgtgcctgcatctgaagcatcagcgcccgtttttcactgttcaccgcctgactcagacgctttgtcataacctgataggaatttgccagtgttctgacctcatccaggccataatctgtttctatagcctgaatatccagattctccagactcgtctgttcgattactccccgcagctctctgattgattttgtaagaatgtaagaccatagaataatcagcagcaaacagactccaaaggcaataatagccgctgccattgctgtgataagaatcgcttcccttccatctccttctgcaatttccggtatataggcaatgacgctgaggtcgaattcttcagaactgcttctggatacaagcatcccggatgttttctcttcctctgactccgccttctcacacagactccgcagactttctgtatctgaataatcgccgttgctggaatacatcacttcctcaccgtttgctacaatgacaaactctgccccgggtgctgccacagccaaagtagaaaggctctctatcgtattttcaacttccagaaatcccatctggtatccctgaagcgctttcatcacagaataaacctccggtccgtccgtccttccccattcatctgtatgcgcaccgatcagaaccgtttttcctttcgcctgaacagcccgttccagataggaaatcgttcccagatcaaaatctgtggaaacctgccgtgcttcttttgcattaaagctgctgaccagattgcccagctgattatagaatactgtcctgtaagaattcttgagaatatactctgtattaaacccattgctcagtgttgttcttgcatttaaaacataagaactctgtacttctctgtccgaaattctcccaagtgtctcaatactgtccagcatatcataatctgacagaatataataaatgatggcatccatcgtacggaatcgatcctccatctgggaaacaagctgagcagaagttacatccaggctgtttttctgacgtttcacttcatagtccagactgatactgtatacaacaattccaagagcaatgctcagcaaaagcgcaatcgttgtataaccaaggatgagttttgtctgatacttcatgatattttttctcctctgactgtgaaaaaagagctgcctgcacatccggactataagtatgcagacagcctgtgccttttttcattgtaccaagccgctagcgcggcggctagccctaagtacgtgaaaccactacttttttcttaaaatttcattttttagaaaataaaagtagcagtttttttatatatgttttattgttgaatcaccacaagacaacctaaaacaatacaagaaaactgctatgcttatgttaccatggatttttaaactcaacaaccacatatttcaattttatatatttttttatcgtcctcctcctgaaaataggaccgttcgtatttttccaaatatttcattctatttcaggaggttctattatggacgattatttaaaacagtaccgggagatgatctccctccgtggtcttaccgaccataccctcacagcttattccacctacatctccgcttacctgggatatctctctgatatcctcggcaaatccccggaggaggtttcctgggccgaactgcgggattttatccgctggcttcaaaaggaacggcagctctctgaccgtaccgtcaatgcctgtatttcccagctgcgtttttttaccacttatgtcctgcgcaggacctgggatccgtaccagcttccattccggaagtttgattcctatctgccttttgttcccaccaggcaggaaatgcagaccttcctttctacaattacagacccgaaattcaaagcacttctctgcctgatgttttcttccggtctgcgcattggggaagtacgccatttaaaatgccgtgatattgaacattccaacggaaggatcctcatccgttcttccaaaagccgttcttccagatacgcccagctctctgagaccgcctggcagctcatcctccggtactggtattccctgcccgggcaggaccggccccgggatttccttttcccacagaaaagggatccttccaggcccatcgaccaccagcgtatcccggattacatccgttcccacgagaaggaactgggatgggaacaccgctttacctgccatactttccggcatgcttttgccacttatcattatgaggacgggacggacctgcttaccctcaaagcccttatgggacataaaagcatcaattccactgccatctacgtccacctttcttctggggctttttcttcttccccaagcccctttgaaaagatgggagggatgctggatgaataacccgaagatccgaagtatctcggaaaactcctatcaggatttcctggaccagggatcccgtccctcttttgtacagcagaaagcttccaggtccatcctttcctgcaagtccggggcactggggatcaacatttcccagtgtccggactgcggacaccttgaattccacaacaattcctaccggaaccgtaactgccccaactgtcaggcggtaaacaaggagatctgggtggataagcgccgggcggaagtcatcgacgcctcctacttccatgtggtctttacacttccacatgaacttaatcccctgctctactgtaaccagcagcttctctatacactcctgcacagatgctacgcccagacacttttagagctctctgctgataaaaagtggctcggtgcaacacccgggatcatccaggtactccatacctggaaccaggaactggattaccatgtacatatgcactgtattatttccggcggcggccttacaccggagcataagatacgggtatcggaaaagaagttttttatcccagccggcgtcctcagggataaatttaaaggaaaatatcttgccgggctggattccctttataaagagcagcagcttgtgttttcctcttcctgcgaaaagctccggaattcctatgaatggtcggaattccgggacaacctgtaccgtaaggaatggtgtccctatatcaaagaaacttttaacggttttggcaacgcgatcgagtatcttggcaggtatacccataaagttgccatctcaaacagccgtatcctgtctgttgatgacaggaaagtaacattttcagcccgagggaaagctcccggagaaccacgcaggactgtcactctggacaatacggaattcatccgcaggtatctgatgcatgtgcttcctgacggcttccaaaagatccgctattacggcttcctgaataaccggtacaagagtaaaaacctgaaactaatctttactctgcaggggcatcagcgtttccatgccagatacacaggactctccatggctgaattgctaaaagcagtctggaaagtggatatctgcatctgcccggaatgtggctgccaacgcatgcagcacataggaaagacatatggtacttcctgacctgcaactgtttctgctaaatatttctttaacaagcctccggaagaaggctttaaaagcatgccttttttcaaaaatggcttccaggttatcatgattatcattagaaacacctgcatcccggcttccatttacgacaatttcaccagatgaaaagaatactttccccatatacatcctggctatcagtccgcggcttggtacaattttgaagaatcacatttagagcagttctgcttttgttcagaactgctcttttctgactgctctgaatatgatacttcacttaagaagtataacatggttttaaaaattgtcaatttttttatattttgttatcattctgttatcacaagcggttgtcaggatactcgcccagcaaccgtttttctattctgttcgttattatttctcactcttttatatatttccacacaacagaaaaaccccggaaaccttgcggttccggggtatcttacgtaagtaggtaatcattcgtatattgacattttataaaagccatctgatactgctcctggctgtctgccagattctctatcagatggcttattattatttttttagtttagtacggcagtattccggaagattctctgaccatggaagcagtttctttaattcttcctctttaggaaaagcccccatttttctgagttcatccaatatataagtcagatatgcgtatggtttcagatggttcagaagtgctgtttctgtaatgctgtaaacaagggcactggcatctgctccccgtacacttttggcaaacagccagttgcggcgtcctactgcaaagtttttcaatgcacgttctgcactgttgttgtctatgctgagatgaccatcttccagataccgtctcagatatacttcctgattaagcgtatacaaaatggcatcaccaataagggaagacctgtctacagaatcttccatcgtatgcagccattcaaacatggcatccataaccggacgggactgtttctggcgctcctcatatttttcttccggtgttttgtcatggagcatctcctcaatcttatagagaatcccgatccttgacattgcctgatatgcaactgtctctttcagctgttcttttgtgaagtcttttttcaatgctgtgagggctgcatcaaagcgccgtcttgcatgggtaaggcatccgcttattatgataccttctcctaaactgtgataagcctgatatccatcacaggtcagatacccatgaaacctgttccctaaaaagtttacaggatgatatcccgcacgggtcctttcataatcgaagagtaccatctgtgtcggcagtccctggggaacatatttccccaaccccgttactgcctgatgaacacattttttctgatacacttctttccaaaatatctttattttccaactccattatgacacctttttccctttctgatttgctttatagtctgctttcgcatcatctactttcaagtcctgattacatttcaggacaaaagtcagtttatatggagaaggattgccgttttcatcatagccgccgacaattaccttttccacgatgctttcaaacacgatacggtcaaattcatccaggatatcttcattttccagtgtcttccgaagctgttccatacgcttgcttatatttttctgctgtccgatattttcttccagatatgccttttcttctgtcatctgatgaagtttcctctgaaaactcagcttcttctcatcatagtcttcctgctctattttaccatcaatcaacagatctgttaacctgctttttttcgtttcaatactggatatatccttctccaactgctttacccgttttaattcagtatcatctttcaagacatcttcaatggtactcaatacggaatccagaacatcatcaaagttatctgccagtaaccggaatgcatctaggaatgcattttcaataattacttcatcaatcgctttacaattcgggcagttactgattccattcttggttgcattcatacactgccagactggttttttcgttgtggtcgtctggtgtcttgttctgcgggaaagtttatgaccgcaatacccacactccagcatactgctgaatgtaaattgtctggtgtagcgttctctgtttgcagttgtctccatcagccttggtcttacacgtttcaggcgaatttcttctgctttatcccaaatttcccttgtaacaatgggttcatgatgatcccggatataataccgttcctcttctcccatattggcaagccgtctcttcgatatggggtcaaccgtaaatgttttaccaagaagaacatctcccttatatttctcatttttgatgatgcccatcactccatgtgtatgccattctacagttccacacctgtttttgatccctaattccatcaatcttctagcaatagtcgaagtaccgtatccctgcagatacagatcataaatcagacgtactgtttctgcttcctgttcattcacagtaattgtcttagtctcccggtcgtaatcataccccaggcatccattgaacccaatcagttcgccccgcttcattttcatccgtaatcccatcttcacattctccgaaagggattccacttctccctgcgaaagagagctaaggatggtaagaagcatttcgccattcatatccagtgtattgatattttctttttcaaatataacggctatattccggtcacggagcatacgcacatatttcaacgtatcctgtgtatttctggaaaaccgggaaatggattttgtaaggatcatatcaattttcccattccggcactcccttatcatttcctgaaatccttcccgtttgtccactttcgttccggtgattgcttcatctgcaaaaatgcctgccagcacccattctttgttttgacgtattttctcttcataataagatttctgagatacaaagctgccaagctgttcatctccgtccgtagatacacggcaatatgccgcaacacggatacgctgaatcgacatccccatacctcgtcttcccacactgtttattgttgttttcgttgcttccaaaatctgaacttgtctcatacccataaacttcctccatttcttttacctgccacatttttctgcttctccatctggcatttttcttattttgcaatatgattttatctaaaataataaatgtgaacgaatgttgcattgctgtgtcttccattgtctttctcaactttctactttttatgcgattgccttcctcggatcatcgctgcgttcccctgcaatcagataactgtccatcagcttccgtctgattctttcatattctttttctgttagaagttccaaacggaataactttgcaagcaaagctattttctttacatattccagttctttcctcatttcttctccccccttcctcatgatttttcggcatcactcccttcgattaaaaatcttgcacttgttttggcttccatttgtactatctgctgtcagtgttacaactgacctctatcagatctgaatctgaaaactggcagctttctctaaggcataccagccgttgccggagtatctttaacgctcgcctgaatataaaatattacagggtcgtggcatctgtgttagcagatcatacagctcatttcattttcaaggtccaaacattcgcttttatgcgaattacattatactgtcattatatttcgcttttctgttaatgtcaagcttattattcgctttttagcgaatgtttctgtttacaaaactacattttgcggttaaaataatattatcaataagaaagtaggaagctgatatgacgattggagataaaataaaaaaaatccggacattccggaaaatgacacaggctgaacttggtgcagcccttgggtggggtgaaaaaggggcgaatcgccttgcccaatacgaaaccaattaccgagttccaaaaaaagaactggtgacagaaatggctaaaatcctgaatgtaaatccatggacactatatgatgccacaacaatggatgctaccgaattcatggagcttctgttctggatagatgaattcaatccgtctgctatcaacttattccaaatggaaacttatcccggagaaaaatgcaattcctccgatgacaccgctgtccgctatcatgataacgatagctggcctgcacatccacctgtgggattatggattaattatgggcttgtcaatgatttcatgaaagaatgggtaatccggaaagaagaactcaaatccggcaaaattacaaaagacgagtattttgaatggaaaatcaactggccgcagacctgtgatgactgtgggaaacatgaaccgatgaagcagtggagaatctcagttgaagaagctagcaaaatttagcaggactaaaaaactctttattatattttcaatcattattacactaaaaattctctgaaaattctcgttttctgaattttcatcattctggtaagcgtctttcatgtatgatgctcactattttccaaatcaaagctgtgatcattatgcaatccagtcagaaaatacaatacaggatcataaaaccattgcttttatcagagacagaaatcacctcacattagaaatcacagaccagatatctgctttatttcttcatacactttcgagaatgttgatggatattcaatgacggtaaaggattaaaaatagtatacatagccgctggttctatagagcttcgcatgtaattgatgaatttgccaggattatacgtttccagtcccacttcgatccgtatgataaaaatacattatttttattttgtggtaaacgtattgactggatcaaaggtctcatctggtaaggcttatccgcagacttttgttatccgtgcaatttctcttttcactggctatataggagcttttcttaagtacggataaaatagttgatcttaatccgcaaatgcatgcaacatcatctttgtcatctggccactcctgattctctacttctgtaattattacgcctccggtctttactacttcttgtttttgaacaaaagacggaaatacatagtggtcttttgttgtctgaatactggtatatcccagtgctgatgtgatatcttccacagcaatacccttacgataaaggcttgtcgcatgggttcaacggagcatatgtacatgtgtcaagtaaggaacaaaaaaatattttttccaacacgcagagctcccacattggatactctgtttattttccattatcctctattttcataatattttccgtcggatttatatgaacgttcaatatacatatccgtcctcctgaatttgaaatttgtttgccagtttcaaattcagaagacagtcctctgatctggttcatgcctgctccaccaattactgccagataaaacctatagatattggctgaaaaaatcaggcacgaaaaaaagctccagtagtcttttctaaactactgaagcttccggctctcaaatttaattcaattttctatgacttctttcaacagcataaccattgtatcagagcaaagtttaaaaatatccggttacgaggcctttaccttcaatgatccgacagttctagtcttttcgaccatttcctcttttatttccatatatgtatttgcaaaagcatattttctggctactgtccaaaaacgaaaatattccacaatctgctatctcttaatcaattcctcattcctaaaataaatgaacaattcctattatctcatggatatcgttttcatatttttattcaaagatacaacttttccttcaaagtgtcaaatttccctcattcttcctcaagatatatctgtatcaaaaggcattatgctttggattaacttttcaattccttcagcagctgagaaaccgttttcttatagataggatgccggatatttggcgcaatttcgctgagaggttttaacacaaactccctcatatgcatttctatatgcggaataataagctcttcattttccatcaccagattatcatacagcagaatatctaagtctaacgttcttggcccccacctgacaatcctttcacggtgcgcttccttttcaatttcatgcagcttttccagaagttcctcaggagacatctgtgtttttagcagaagacatgcatttaaaaaatcatcttgctcaatgcctccgtaaggttctgttaccagatactctgataccttttccactctacagtccttttcctcattcaaacgctgtattgcataatctaaatatgctttcttatctcctagattagatcccagacccaaatatgctctgtgccaaaatctgctaattttgacagatgcatattccaccggcagtccaatcggtgcccaaggcttctttaattctaagtcaataccttccagcaatgggaatttcagcaaaatttcctgaaccagattttctgcagctgcctcaattaaatgatacgtattattcttcataaattcggtgacaaaatggctcactgcaccataatccacagacatttgaaggtcatcactttttccggctcttcgtgtatccatgtaaagaactaaggatactataaatttttgtcccagtttggtttcctccggaaatacaccatgatttgcaaaaaaatccagattttctatatgtatttcatcatatttcatattctttactcccttaaaattccctgtgtcatttttatggctcttatattttctttcacatcatgtactcgtacaaaagaagcgcctttctctactcccataactgtcgtaacaagagttccttctacacgctggtcagcgggaaggtccagtgtaagtccaatgactgactttctggaagttgcaagtaatataggataacctaatgttttgaggcattccaggtgatgaataatttgaagattttgttcgtaagtttttccaaagcccacccccggatccaaaatgatatgttcatcaggaatccctgcttccttggctatttttacagaatctctcagctcctgacagacatcctctaaaaaattttcatattctgtattatccctgttatgcataagacagcacggaacctgatattctgcaatcagatcggctactctcctgtcatactttaatccccagatatcattcaccaggtctgcacctgcttttaaagcagcctccacaaccgggcttttataactgtcaatagataccggaacagaaaagttttcctttatcatttgaatcacaggtacaactctctcaatttcttcttctatggttatttgtgtatgtcctggacgtgtagattctcctcctacatcaataatggcagcaccttcttttatcatatcagagacatgctgcagagccttatcccgatccgtccatttccctccgtctgaaaaagaatccggcgtcacattcaaaatacccataacataacattctttctttatatcaaaatactcattaccgattttcatatgattgccttctttctgtctttataaaaataacaaatgattttttttctcttcgctccagttacattctgccgatgctttacaaaatccgcacattctggactgcttgtccgcccaataaagtagttctgataagcccctgttctcctgattttccttagccctatgacaggcaatagctgcaagaatctcttcttgttcttctggagcaaacttgcagtcctccagaatttcctttgctaaaggaattactgctttctcatgagggattccctgtgtatattgcaggctccttcccagatcatgaagcagagctgccgcataaatcagttctttttctatattataactgttttccaaatttttaatatacgcgattcttgccacatctaacaaatgttcgatgccatgtttacagaagatacggcttttttccagttcctccagttccaacatatattttttccagacaggatgactgcaaattttattgttccgtttcatcctatctcctttccagcatacgataaaactggttctgaagcttttcgtctccgtcaaaaacgcctcttgtaacaaccgtaaccgtctttgttccaggtttttttattccccgcatagtcatgcacatatgttccgcctctatcaataccatcactccatgaggtttcagttcttccataaatacatcagctatttgcgctgtcagacgctcctgcagctgtaaacgttttgcaaagacctctaaggtacgagccattttactaagccccactacttctccatcaggaatataggcaatcgcagcagttccataaaatggcagcatatgatgctcacaaaaagaataaaatggaatctccttttccatgaccatatcattattatccacatggaaccgctttctcagatgctcagctgcacagtctgtatatccggctgccaattcttcatacattcttgcaattctgtccggagtttctaaaagcccttctctgttaatatcctcaccgattccctctaaaatcagctttacgccttcttgtattttttctttattcatctttcttccctctttcctctactgctttttccgccaattgtaaaaacgataacgagccaaaaactaccaatatatcctctttgcccattaaatccaaactttttccgatagcatcttctatacttgccgatacttctacagatggattcactaattccaccttttgcttcaattgctctgcagataaagctcttggattatgaggggtctctacggtaacaatatgctgtgccaatggagctgtaatctctataaccttgttatagtctttatcttcaaacataccaaaaacataataaatttttctatcaccgaaatacatttccagtgactctctcaaagcctgcgctgcctgaggattatgggcaccgtccaacaagataaccggttcccgggatatcacagtaaatctgcctttccactttgtatcaaacatcccgtcataaatctgtttctctgacaataaaaatccttcttctctcagctgttctactgcttctaaggccaacgccgcattttgaatttgaaattttccagccaaagatatccgaacgtttttccactttttataggaaaagctctgacaatcccatccataatgaatatcttcgaaacaggaaggatccacttcgcggaaaaaacatttccgctctgcacaaacttgtttcagcacgtctctagcttcttttttctgtgcagctgttactactctggtattttctttaataattccggctttttgacgtgctattttttccagtgtattgcccagttctttcatgtgatccatgcctattggcgtgacaacttctaaaatcgttgtgtttaccacatttgttgcatctaaagctccgcccattcccgtttcaagaactacgatgtcacacttcttctctttaaaatacataaacgccaacgctgtctcaatttcaaacacggtaggtataggttccttctcccttctcatgtcctctaccacatgggaaattgttgtaatatgtttggcaagagaatccttttctatcttttcatcgttcacctggattctctcacgataagaaaaaagtgcgggagagctatatcttcctgtacaatatcctgcatttttcaggattgtggacaggtatgccagcacagaccccttgccattcgttccggaaatgtgaataaacttcagttcatcctggggattatcaagtctgtccaacagtgctctcatactctccaagccaagtacacttccgtatttggacatttcgtccaaatatactcttgctctttcgtaattcatttttattttctcctatctgagatgatattttccgtctcattataggattctttttcctgaaactcaatacattttacactatttacaaatatttttataatccaatgaattttttcttcagtttttttccatattccatactagggaatgtatagtctcccagctttcttaccggcataattcccagtatagaatttgtcaggaacatttcatcatactgttccacatcttttggtaaaattattttttcttctacttcaaaagtttgaattaaatactccctgataataccaggaagcataccgcaaactcgggcaggtgtaacgatttttttctcttttataaagaatacattggtagtcgccccctctgcaatctgacctttggtattcaaaaagaccggttcctgaattccttttttttgagcatttcttttttccgtaatgcagtccccatagtttaaggttttatgatatgtaaacggagatgtctcatttcttcttatctttgaaaattcagtcagaaatcctttttcataatcttctttgcaatacctgttatctcttatgccaatgtctatatttttttctgaaacagtaatttttaaaacccttctccctttttttattgtttcatcttctaatacttgatttacctgttctcttatttcattcaagtctctttgtatccccaaaaacttaagcgtatccagcaagcgtttataatgctggtctaaaaattgtggcaccccctcttccaaagcaatggtttcaaatgccccgattccaaagtaatatccctcatcttttataagcatgactcttcctcccaaagggcctccagaatggctttcgctttctgtaaagtttcttcatattcaaattctaaatctgattcgcacgtgattccgccgcctacccccagataatatctgtggtcctgataaactgcggttcgaataataatattaaagtcacaattgccgtcaaaggaaaaataacctaaagatcctgtatataaatttcgtctgtcatgttccaattcatcaatgatttccattgcccgtattttaggtgctccggttatagagccgcctgggaaaactgcttttaataaatcgtgtgtgtttatattctcttttaatctccccacaatagttgtcactaaatgaaaaaccgttgcatacgtctcaattgcaaaatgttccgttacttttacacttcccggaatacatatatgatttaaatcatttctttccaagtctacgatcatcaacaactcactgcgatcttttgatgaatttcgcagttcttcccgtaaagaaatatcttcttcctctgtttctcccctctttctggtgcctttgatcggacgtgtttctatattatttttattgatttttaaaaaccgttccggagatgcactgatgatctgaaagtctccgcactgaaagaaactgccaaacggagccggattatacgttcttagataacgatagacatcatagggactttttttgctgtcaactgtcagctgctgcgtcatatttgcaatataaatatccccttctataatataatgaatcatgttatcaatggctgttttatattcttcttttgtgaaattaggataaaattccgcctgttccttatgcctaagaggaattttcacagatgcacatttttctatttcctgcttcaaggtttttaccacactctctgcattttctgtttcccctcttgctgtaatataaagtatttttttaactttatcttcaataatcaaaacatcataaaagacaaacagcacttccggtatctgtaattttttaggatgacggcttcttataccctcaaattttcttccataatcataggaaaaataacctaatgcccctgaaatcaacggtaaatctgtgggattgtcttctttatattgcttcaaatatttttgtattccctgttcaaaagtttcctcttgaggctcatcattcttgtaaaaaatcccatcgttctcttttaaaatcaaatagggtttcaagccaataatggagtatctgcctagctgattttccagagaagaatctaaaaaaatagccataggttcacatttatactgttcaaaaatatcttctgattttctataaaaatccagtttataaatctttgtcttcatattttttcttccattcttcgcatattttcataaagtttcccaataattcatgtccatattctgtcaaaacagcttcgggatgaaattgaactccataaatatgataagttttatgatgtattcccataataattccatcttctgagcgggcatcgatttccagaatgtccggaaaattctcatcactgacaatcagagaatgatatcttgtcacggtatatgattccggaagtctgtcaaaaagagctttttgatgatgatatatttttgtaacctttccatgcattggtttgggacctttttttaccttggctctaaagacatgtccaataatctgatgcccaaggcaaacaccaagaattggaattttacctgccatatttaatataatttccttgcatatcccacagtcttctggacttttgggtcctggtgaaataataattccttccagaataccttgcttcaggaaatcattaatttcctctatggtaattttatcattacgcactaaataaatattttctccatattctctaaaataacaaacaagattatgtacaaaagaatcataattatcaatcattaaatacatattttcctccaaaaaagactaccaaaaaagaacctgtaaaagattcttttttggcagtcttccattttttatgggcacaccctctatattttatttatcagttactttctataatctttcccacattttcattatatctgctatattttccattctctaaaatgaatgagaaataattcttagttctcacattctttatatacaactttatcaacaatcatatagaccgggaaaaccaaaaacaaaatcatatttattttatcatagattttgaaactcaacaactacatattttgcttttttatccgtccacctcttcttactctctcgtttcagatagttttgacgaaatctttctctgcattcttcgcactttcggatttcttctacctcttcccatgtcggcacaacttatccaaattcgggtggaacaaaatacccgacaaagttaaagcaaatagtatccattagctatctcatcctcccttgcaatcacgatcatgaataagtatttttccgataaactcattgaacataacaacaggcttttcatattcctgaacagcctgtgccaacatatagatttcagaagacaattctgactgttcctttatatgaacatgctcactgctatccctaaattatgaaatacttaaaccaacaacttgcaaacacaaccatcgtcataatccaaaaactgtatttccagaattcttcccttttcttcaccattgccactttcttttgggtctgtttttttatttttctcactgtagtctctacattcttctttgctaatcgttcctgtttctccgcattacgcattttctgttccgcctcctttttcttttccagtgctacttcaacagcctccactgaagacattacgaccagcttctccagcttacagttctggctctgaatgtctcttattctttcttcgagctgctcttgctctttcctgctcagcaatccgttcctgttccgcagatcgtcgttgcttctctgcagatactgactgatattctgcgttttggacaattcgatttgcagtttctgattttcctcggttaacttctgaagctcgtcttgcagcttctgattttcggatgagagactccgaatcccttctcgaaactctccgattcgttccatacatttctgtatcaattctcgatcttttgtctgggctttcaataattcgtccctctctgcagtcacattcgacagggcctccgcctgttcctgcgacagcttcttccacttgtcgatagtatcgtgtgagatcggcatcaactgtgtcatatctgtggataccatagttttctttttgttcatttctgataaattcatcctctaattcccccttactgatttttaaatgaaaagtcttagaaaggttactgtcacgtaccttcttcccttcctgattttgaaacgtgatatgctttcttttctctgtccaattcacgctccatcctgcattcttcatttctctgataaattgctcccggctggtgcaatactccatcacattcagcacagccatggcacaatctgccacataactatcctttgcatggttacgaaacagattgtatttgtctttgctccatgcggtcacttctccgttctcaatctgactgccatcaaaatgcttgcctttttccgctatggagagtccacgttcccggcacatccgattcgtcagccgcttcatacgttccagatcttttctggaattatgcagttttttcccattttcgtagcttacagaattagtaactatatggcagtgaatatggtctttatccttgtgaacactgacaacggtctgaaaaccggcaaaccacttttcagcaaattctattccaaattccaaagcctgctcaggtgtgattttctcatctttatgccaggaaatcacattatggaaatacatccgaccggaatccttcccccataatcgtttttccgctaaaaatgactgatataccagatcataatttactttttcatacggatacggcccaataatatgaacaagatgctgctccgtttttccctcccgcaggatatactcaatacagtttctcattgccccatgggaatttgtccgcttattaattgtcttattgattgccatatcgtttcacactccttccgataccccgatatgttttcactgagactgttcagcacatctgctctgggataaaaactgccagcattcatatgatgtgcgatctggttgatattggttgttgcacctcgtagcagatggtttgtttccccaagcctttgatttaatacattcaattcctcttttacctccgctgacattagatccacattttcaattgcggcaagtatcactgcctgctgtgtctgacccgatgctttgatcttttgctgaagcagggcatattctttctcattcatccttatcgtaacggtatggtttctttttctcataatcctttcactccttctataatctacactgttattttcatgcacttccaactacgagggaattccataaggggaaatgaaatcttcccctttggtgggtgcagggcaaagccctagtcaatctatgaatctgtgaatggaatgtccggtggacatttcaggaacagaacttcatagcattggcggccagggttccaagggacagcgtcctctggcaagtttaggaacagccccttggctgattccggtgcatagtggcttgccactttgcgaaacttgcctgtcatcttctgccattccatacgtgctgattgcttctgctcctcttcacacaaataaaagaaaggcaggaagatgacagtggttttgtgggatgcaaaaaggatataaaggcaatagaagttctcacctttccagagaatttctatttccggaatgtcttttgggcatcccactccggtgcgcagtaccggacaatcatgtgccgtatccggcacctaaccagatatatctgcctgtactttttgtacatcctgccagtctctactgttcaccgcactcttttccactaccgaaggacaaaaatagcagttaaaaacaataaccgttttttccccggaaaattgtttcaactgctatgatcttttactgctattattcaattgtccattcatcaaattctgttaaacttccatccaaacagatccacttttcaaaagtgctgaagctcttccaactctttctccaatttctcaatacgatggtgctgataccagatcacccctggcaaacctgcagccataagaaaggcacaaaccaacaccttcaaagcatcccatctggattctattccactcatggaaaatccacacacaagattaacgaataggacataaaaatatccgcaaaataaagcggtacaaaacatcccttttaaaaatttccacattttagttcccatctttacacctcctcaaaaataagtttagcgattttttcgctaaatatcaatagtgaatatttcgctaagatattatgaatccatgaggtgaaaataatgtatagtagaatccgaaatctaagagaggatcgtgatctcacacaaaaacaaatgggcgagatcttaaattgcagccagcgtatttacagtaattatgaatgcggcgatgtagacattcccacacaaatcctgatcaaactggccaaatttcataaaaccagcgttgattatctgcttgaactgacagatgacaaacgcccctacccccgtaaaaaggatggaaatcaatagattctttctgcccggcttctcatgccgggcattttttcctgctctttttattttcttttaaaaattgtctgcaaaatctaatgccgcatctgcattttcttcctgttccctatccattgaatcaacagcaaaaacagtctcttctttttcttgcacaaacggctttccgacaccattcatatacggatgcagcagctccatgagatttttcgcaagtaacataggaaccgattcttttaccccttctttgatagcgttctgcacctgtctcagaaacgcatcttccttttcccgagtctccaggtaaggatcttcttccttctcatattcccgaccaaaataatcattcacagcagctactaccgcccgtgtataggatttatactttttcctgttcatggtctgtaaatactcccaagcctgacggtctgcctcgtccagcagattcaggcggatatttgtattgatgattttccgttcctttctcatactcatatcagtctgcctccattcttctgaatttttctgactgccagcatctcgtaaccttttgccgctgcacagatatcatggataatggttacccggttcctgacataatctccaaagttttcgatcatacagccaccgcctccgactacatacagccgcattaattccggattatattcgtgttccctcagttttcgaaagatttctgctgtataatctcttgcagccgctttcataacatccagataattttccccgatatctgctgttccttttcggatcacctgttcaatgaccagatcgtccactactgctcccatcctccttaataactgttccctgacagccagcacacattgatgtgtcccgtatttttcagtaaaacatttcttttctaccggtcgtgaattattgatatacatgatattcattgtcccatttccgatgtccactagcatattgattcccataaattcctgcagatgatatgcgacagctgcaaatccctgtggaaaaatatctgccccgataaactctacatgataagcttttccacgaaacacaaaatccaccactgcattctgaagcagataatcacggaaagtttctttctgactgctcacccatgtcagcggaagtccggcagccagatgtactttcgcctgatccacccctttactttccaactcactggcaatggccgcaagtgtaaggatgtaatagtcctcatcctccgttttttctgcccgaaactccttgtgttcttctccaatctggtaatacactccttgataaaccagaaggttattctggaatgtaggctccttttcatatctggttacacctgcctgaaaacatctgcaggctgttttcaggtttccatatccgtgatccacaccaatcactgtaattatctgattttccttatttttcatcattctcatattatctttctcctttatttttttgaaccaaattaatacttacgctctttgataagataaatattttattatctctttcattaattctttaatattaagttttttacatacttaatagtgtcccatgatcctgcacaggtttttcccacataggcttctcctatggcctgacattcccagatgggaataacccatacagtgatttcctatggtctgatgtatccagattgtaaaacctgtattgcatattttcatatctgctcattcatttcccttccccgaaggtacttcacggacaatatattccgtatccccataacagccgtcacaatacctgatcctgtgtctctccacatatccatgatgttctaattcttttatcgctgatcttacagaatcaatcccatccctgcttaaagatgccagccccttcatattataattccagtcatctggcaaactcagcatcagagaaagaaggccttttgcctttaaagagagtttcttattcttgaaatgatgattgctcataactgtaaaattcttcgtccgctccacccggaacacctgtgacatagcttcacctccaataaaaaaggcacaaagcctttcatgacctgtgccgtatctcctatttattttgtttatcttttcttttaggaaacgtaaatcagttccgccaaaatcatttcctctgcaattgccctatgccgattgcctgctcttacccatgccatctggtcatcctccttatcaggcaaaggatcgctcttttccagctgtttcagtataatttcttcccgctcctttgctacccggtcaatttccaacaaatgctcgccaagcgtatcttttaaaagcatcacctgatattttgcccgtttgcagtttttcaggtaatccctgcgcaagaatccgtattttccgatatgcaacatctgttctccagatttatattccagttccggcagcaaatacccattcacatttttataattcagttccataactctaccctctctttccattatatttcctgttgaacatcttttttcttattctgatgtgcccatcctttcagtagtttttcgatcagatctgcctgttgagccggtgtataatctggtggaaaatactttccaatccggtcaaaaggaatttttacctgttccctctggttaggcttgagttcctgaagaatatcataaatcatgtccatatcaagctgtttctgctggctcatcctctttaaccggttggcctgtgaaatattcggaatacactgttccagttccattacagcatgaagctcatactgttcttcttctgtcaggaatgaaatttccactgcagaacggattgccagcaattcccggtcaaccatatccaaaatcttcggtatcaggtttgtgagacgaatataacgcttaatctgggtcacactttcccccaccatccgggcaagctgttcattgctccgataaccgcctgcagaatccgtctttttaatatttaccttgccattttcagagacatccgcttctaataaagatatctcaaccatttccttaatacacttcggttccaatgggtccgaagataattcctttctttttccctgccggttcattgcctgtaacctcatcttataagcaaaggctttttcactcggcagaattttttctctctgtaagttactgtctatcattgcgatgactgcctgatcatcatccatcgtacagatgatagccggaacttctttgattcctgcccagagggcagcttcttttcttcgatgccctgcaatgatttcaaatccttctccatccggatttttacggaccagcagcggcaccagtataccttcctgctgaatacttctgcgcaactcaaagagttcctgatttcgttctactttaaatggatgttctttgaagtcatgcaattcccttattttaatcattccaatgtctgcacccggcacgtcagtctgtaatgaacacatcgctttcttttttaccatttgatttttcctcctgttccgtgcaaaagagaaaggactcttaccttccagaaaaactctgaaaacaagcgtccttttcactcttatcctcgatattcagattgaaatgttacatcaacttttatgtgtctactcataccacatgcaaaactacagacacctctataccatccataatctgtttttttcgtccctgtttgcctgtcggtgcgaaactcatatacctcgcaaagtgcctgaaattcagcacttctacgaattcacccgatgtagacaacagacggtctccacatgcggggagccactgaactcatccgtgaggtatacccacatccagttctgggtcgtacctttctgctctggttctccaagtacctggatacggctttcatcacaatggatatatctgctttccagaagttcttctttcatcagctgatacagtggtttcaggtatctgtctgcacagtttatgatccagtttgccatagtctttgtggaaagatcaagatcatatctggcaaactctctttcctggcgtgccagaggcatcccatttacatatttagcgttcatgataccggcgacaagggaaggcgtagcgatacttccacggatcagggaaggttctttttccggacgtttcatggccccgcattttggacagctgtatacataagtgatctcttcttcaacctcaaactttgcaggtacaaaacgcaggcgttttacggtttcctttgttactacgctgtatttttttccgcattccgggcagtaacgggcttccccttccagtttataggtcctggtctcaacagtctcaaaattggaaagatcttcttccttctttccttttctctttttacgtttataagaggatggccggatctcttcaaacagctcttctgtttccgcatccgcactggcttctgcctcattgaacaggttcatctgttcatagccttcggcatacttttcgctggatgcaccaaactgtttcctctgtgcaagggtaagacggtcagagagcatggcatttaagaattcgagttccttctgtttatccttcagcagctggatctccgtatccttcttctttgtctgttcctgtacgatcttcatcaatgagatcagatcttcacggctcatgttattcagctgtttatctgtaaagatcggttccatgtcctgtcctcccggcttttatcattatcaaaagtataccatgatcccagctgttttcctatggaaaactgcgtttccggatataggaaatatgcaggaagatgtcgtatttttcatgatttttacgggattgacagctccgctgtcgtatgcttacagaatgatctttggatggtgttcctcaaatgcacctctgggatttaaggatagtccgtcacacagccagtggatctctttcagagtcacctggcggagttcgtccggagtatccggccagtggaaggcattacggtcgagccgtttcatcaggatccagaatccggatccgtcccattggaggatctttatagaagtacgccgacggttgcagaacgcaaacatgcagcgtgagtatgggtcgaggtgaaattttaatttgatgatggcagccagaccattgtaactttttctcagatcagtgactccgcaggcaagatataccgttgttcctcctgccaagtcaagcatggcactgcaggaatcccagtatggattccatcagttccggtctgcaggaatcagatatttcaatacggatactgtctgagacaaaaatacgcaccggtgcagtttcttcagagagaagctttctggcagcttcctgttcagatggcagtctggcaaagaccagatcctgttcaggttcagatgccggatcttctttagcaagtctgcgggtccagtatcccatcgtagataaagggatatcgttttctgcacaccattgtttacacgtttgtccactggttttgtattgttggatacggtcagcccagagttttgctttttcttctttgttcatagtgtatagaatacctcctgagttttaaggagattgtagcagaataaaaaatgaaaaaacagatacggatgattacttacttactatcttacgtttggacacaatgtaccttgcggtactcaatatatattagtcagtgattactcgatgattgtagcaacacgtcctgatcctactgtacgtccaccttcacgatactttaatatcattttacctcatattttttatggttttctctccaaaatacagtgaaaaacgactgatttgtactatttatttttatttgcctgatttcttggcaccgttttggcaccggaagcctcagtcaaaaagcttctcttctgctgtttatactcttctctatcagctttaatttatagccaaaaagcagccagtttttcatataaataatttctaataacttttatcgcctttcttcaaaggagaaaacgtaatcttatttgccaaaagaaaaagaattattattacaataccaaatcccacaaaaagtgaacttgtatcaacaacagtaactttgtatataatactaatcacaaaagataccactggcgcgcatgcgtatgtaagtgaaaatcgaattgcagaaacacgtcctatatattctttagtaacttcttttacaaatttcacttgtacataagtaatcattaatcccaatgctgcaccaattattatcgaaccgattagcaacagtaatttttgagttataggatttgcaatatattttgaaacaaatgcaataaaaacatagtatacacctaaaacaattccacaaaatgtaacaagtgtattattttttttctcctctttcatttttgcaaaagtcaatgatcccaaaatagtaccaatagttacgcttacacttagtaatgaaacaattttggcatctccactaaacatttctcttgcaatcggggcgagcagtgcatcaaatggaaccactgctgaattaattagaatacataaaaaacatagttttaatagcttcttatggtcaaatacataactaaatccatctctaagcgaaattaaatattctctgccaattattcggtttgtcttcttttcttcttgaacagaaaattctatttttactataagcaacgctgatattaaaaatatcaaagcatctatcgctaaagaaatacctattccaaatgaactaatcactatgcctgacaagccagttccaactaatactgctattttggtacaagacacattgacacttacacctttatcataatgttcattaggaagtacatgctgaataactgctacccctgctggcatatgaaatgcttctattaatgaaatggatattgtcataaaaaccaatattaatggtgaaagcatgttttgtgtatatacatataatatatacaaaactaacagaactcgagctatatctgaaagtactaacactttctttttattcatattctcgactaatggacctataaatggttgaataattacagaagtagcttgattaataccaaaaataatcgcagaccaccctgcactatttgtaagtaaatataccaaccatgtaaaaagtattgtatctaatgaatcaccacagcggttaataatattagaagtcagcagataaacataattgtggttatgatataactcatgtttattcatatctgttacctctctaatcataatttagattgtttaatttcgcaagctatcttataaagatcctgatgttttaaagccgctgctttttctataacattatcaatttctgatatatcattaagtgattccaaatattttttccattttttcatttcaacattatatgcacagtatctattttcactttcaaatgagccgttaatgcaataacgactattactacatcctcctaagcatcgttctgtataacgacattctctgcaaaatccttttaacttactactatcaaaatttctattccacttaaaagagtccggactttcccaaatcgactttaaagatttttcacgaatatttcccgctactaatgttttatctctaatagaagtacaagcaacaatatctccattatgcagaataccaattacatgctttcctgctccacaacctgtccaagaccaattatcattaagaaaattctcatttacttttatatctttattgctataataacctatgcaatctgccaaaacaattaacaacttacctccaattttattatatgcaaaatcaataatagaaagaatatcttgaggttctataagccattctgggcgttttgcaaaattccccattggtaatgcaatctgaaactgccaactattaactcccaaatcacttaataattgatatagttcttccaattcacatatattttctttatttattgaagttattactgatgtcgaaatattattttttcttaattctttcaatgctttaatacttttattgaatgatcccgatctccgtataaaatcgtgagttttttcaagaccatcaatacttaaacagacacttctaattcctgatgttatcgcattatgaataaagttttcatcaatcaaccaaccatttgtaataatacttgttattatgccattatctactaatcttttcgcaataatatgccagtcactacgtgtcgtaggttcccctccagataatgtaataacttttaatcccaaatcttttaattggtcacacaccccaagagcttctgatgtattcaactcatcgggtagcgcttctgcacaacttgaaccgcaatgtttacaacgcatattacaacccattgttatttcccatacagctgtagttaatttattcatatattctctcctataatcctttttaaataaaaaagacctactctatattcctttttacatagagcaagtcttttctacaaactacattctcacacctgttccgtacataactggtccaaataagttcttagaggtttttaattcagaaatctctacaaactccaagctcaattcttcaagattaaacatttttatccacctcccgtttattggatttatcttaaatatacatctcttattttcaaacgtcaagttattttcattatttttttccaaatttcgagttcaaattctcgttttatttgtaacatattttccattttctacgcatacatcagatctcttaaccacctatttatgttcttcttatcttgcatctctgtcatatctttttttctgtccctttcttatttcatattcttctatctcccgatttctctctgcttgaacaagcatatccgccttattctcgccaactgctcgtttcaatcggtaataatcctgattttcttctttaagactgtcgattacctctatctgctcctgattccgcatagctaacattttgtttgaactctctaatctgttatatttatactgaactctatcaacttcttcacgaattttgatatatgccagatataagctatatagtaattccttcaattttccaatcactggctttgccttcttctctcgataggttttagcagattccagaaaatctgcttctggaagcacttcatctatgggtttagaaaactccccagcatatcgccttatattatctgcaagaggagctatccgtttaagctgtttttcatatttctcggcttgtttctttgatttttctgcttctttttctgttttatccaaattatcctgaaccttacaaatatccttctcaagttcatccaattggtcaagcatcctctcatttatttcttccatcaccactttgcgttcttctagtctggcatttttttcctccaacctagctttttgaacttctaactctgcaacttcctttttgcgttcttttttcttgaaattgtaaacatccaaatgctcttcatgtgtgcctttctgctcccattcaattccatattgctttgcaatttctgccagcacttctttttcatggtttatccactgattcagttctgtatcatgcttatttccaccttgaaatccaaggcttttcaatgcctgtttcagtgaaactctggtatccattccttttcccttccagttagtcacataaggcacaaagtcaatatgtaaatgtggtgttgcttcatcctggtgcagatagcagctaaatacacaaagtgtcggattccgtttttggaagtctttcacatattcatccagtacctttacagccatatctccttctgtcgttcccactgccatatcctcacgatttccaatctggaatatcacttcatgaaacaacttttcttgtttgctctgtcgtattttttcataataatttgcaatctgcctgtcctttcttttcccaacattatatctctccacagcatcgtcaaatagctctttataaacttctttcagattctcattctggtagcaaatattcagttgtactctgtctggatctacattttctgctataaaatcccgtctgttatgagccagtgaaccggctccgatcataccactaatcgttcgtttcatcataagttttctcatctcctctctgttcgagtgccagatatcgcacgtgatttttatttacgccagttatggcgatatttaagaaactgtcgccggatacggcggttttgttacttttgtcaaaagtaacgcaaaagcactttcgacagccgtaccgtccatcaaaagtacccttgcgccctgccggggtgcaagacgtccggaggacgtctgccctgcaccgaccgaagcggagcggagacctattttatctccttcgttactctctcaactaaattattccggtattctcgcctgcacatattccagatttccacagtacggcgttcccaccagataccattctcttgccgtattcatctccattcttgtccttacccacttatcgtcaatcagcacctcaagaccttctccacagtgaaatcccgtatcgatccataaatctgatgataataagccatatctgtcattgctactgttatatcctaatcttccttgtttcattgtaccattctcctttcacagcgataaaatttccgttaaattcacagttcaatcagaacctttcgtttgcaccttaccggcattctccttgtttatttctcacaggtgcgtgacacgctcctgtaataaagtaatcagtaaggactgttaccatcgaaagctctcttgcattccctttctgtccagatattcctgccggaatctttccctttcttcttccgttggtgccgttttggatttgctgtacacttcacgattcatcattgcatccagttttttctccaatcccagccggattatttcttcaccatcgtagttatccatcaaaaaatattgcaggagttgaaaaaataactcatatggaatctgtacacttttattttgcatctgttctcctttcaaggtggtaagattcccccttcttaagaaatggtaatcttgccatcttccttttttattctggcaacatccaataccattgttttcctcgttttacggaatcaatttcaagttcccgtttggcattccacaacgtttttctttttattcctctggattctgcttcttctgcaattttcttttgagtcattcctccgtttgccagaatctcaagcaaaaattcttttgctttctggattttttgtcctctactgtctccattaagaagttcatcggcactgatatcatattctccaatccattcaaacccattatttttatccagtctgaatgcaatcgacgttccttccggtgcaagagaacttttcgtatggcataccactcttatttccggttcttccttcactcgcccgacaatcaaaacacttcttgcagccgcctgaaaatcaatagaacccagtccacgataagaagatttaccattactgtttttgttcatatgaccaattaaaatgattgcacagtgatatttttctgctagcactgcgatacgcttcatcagtggtctgatctcatttgcccggtgcatatctacctctgctcccaagaatccctgaatcggatcaagaacaaccatttttgcttttgtctgcacgatagcttcttccaatcgaacatctgccattgtcagtggctgatcgctatcatcaatcaccagcacctttgaacaatctgcacctgccgcaagtaatctaggtttaatagtatctccaagaccatcttctgctgtctggtaaatcacatttacaggcgacataagagagtgttcctgcctattgtcttcggcatttaaatccgcattctcactatcgacttcatcacttcgtttttcttttgttttcattgtatcagtgacaggaagaatcggttcccctttggtcagttttgcgataatctgaagtaccatcgttgtctttccttcacctggatctccctgtataatggtcactttcccataaggaataaacggataaagcagccattctacctgttccacctctactgaatccatattaatcagtttcagttttggttctattctacaattctcaattatatttttttcattcatgttcattccattatctcctcctgcccttccgggcaagtctctgataaacagatattcgggaattgtcgtatttcccgattcgtgatatactgaatctgccaagatggtatatcagtgaatctgattatcagagaacttgctcagattatctatctgggctttttcttttatcttttcaaccttcatctcttgcttctcccaaaccagtaacagcatttccattttcattatccagcagatttgcaatcttcctctgctgatttggataaagatgtccataagtgttcaatgtgatacgaatatctttatgccctaatctgtcccgaatcagtaatggttccacgcctttctcaatgagataagctacatgactatgtctgagatcatgcactcggattttctttactcctgccaactcaatctgccgtttcatcttatgctgtaccgcttcctgaacgactggaaataatctttctgtatctggcattccatagtgaccatctacaaatttcttaatttcctcttttagaaattctggaatttcgattgtccgaaaagactgttttgttttcggttctgtgataatatcctgcattcctgttcgataataagtcttattgatactgagctgatttttctcaaaattaatgtcagcttttgtaatcgcaagcagctccccgattctgcatccagtccaaaacaatacctcaaacataagataatatcgtgttcccggctccattgtctgtataaactgtttatactcgtccagtgtccagaagttcaaacttcttgaatccgaatttcccattcgtttcactttcttacatggattaaccggcaaatcatagatcttagctgcatgtgtaaacagactggtcaactgattctgaatcattctcagataagaatctgaatatcctttcttctgaatttcattctgccactgaataatctgtgaagccttaatctcactcatcatctgatttccaaagtatggaataatatgctgttgcatcatatatcttttatttttgattgtccgatccttcagttcattctgtttgtctgaaaaataaatctcaataaaatcgctcagtctcatatccatacttcgctcattgcttaactttttacttcgttcaaactccaatgcttctcgctttgtttcaaatccacgctttctgcgttttttcttctcacccataacattagtctcaaaccactgggctgtccatttttttgtgtctttttctctgtaagccatattgatcctcctttaatttcctgctatttcatagccatacatcctttttgcccaaaatgcctttggtattcttccagccatcgtaatatatccctgtgcagccagttccttattcatagcttttaccagtttataggcatgagattttgaacagtttaattcctgtgccacttcatcagcactcatcatataattgtagcttgccattttgcatcctcctttcctctttagacttcaaatacgtttactgtattttgtatttgtacgattttcgtaaattgataatatcatgtattttaatcgttgtcaatatttcgtaattacatttttacgaatttcgtatattattttttctttattttattccaaatctgtgatatgatatttaatagatttatgtttttcgtatttttttaatatatgaaaaaggaggattctatgggtgacggtaaaaatttaaagaaatatcttgatgaaaaaggcacaaatgtccgtaaaattgcaaaagcaactggaatcagtgctacaaccttatattcaatcattcaaaaagattccaatattcgatttgattttgctttaagacttgcaaacgaattgcaaattgatgtgaatgagatatgttctgccagtccattttctggcacaattaaggaagaagagatttatcctacacttccagacggtttgaacggagccttagacgcaagtcgtgtaaagacttacttaaaaaattctatgtatccgttgatgtatctttttggcaaaaatagtatgcctgatgtagataatctacttacatcattctatcagcttgatgatgaagccagacaggaagttgtagaaacaatccgtctgaaactgcaatatcatcgagatccgaaacgtgctgaacagatcaagcagattaaaggttggtaaaaaatcactcctgtgaatggcaaacattcgcaggagtttctttttgggcaccgttttggcaccactggtcttatttttcaattttaaatttatctgtattttatcttgctgataaatatttcgctatttctctacttataatttttcaaatcattctctctttaagatacagaaaaaccccagaaacacaaggtttccggggcatcttacgcttggacacaaagttatcttacgataacactatatataatttatctgataatcagtgattactcgataactgtagcaacacggcctgatcctacagtacgtccgccttcacgaatagcgaatgtaagaccctggctcatagcaatcgggtggatcagctcgattgtcatttcgatgttatctccaggcatgcacatctctgttccttctggaaggttgcaaacacctgttacgtcagttgttctgaagtagaactgcggacgatagttgttgaagaatggtgtatgacggccaccctcgtcttttgtcagaacgtaaacctgagctgtgaattttgtatggcatgtgattgtgcctggtttagcaagaacctgtccacgctcgatctcgtttctctgaacaccacgaagaagtgcaccgatgttgtcaccagcctgagcctcgtcaagaagtttacggaacatctcgataccagttacaacaactttacgtgtctcttctttgataccaacgatttcaacttcctcagatacgtgaagaacaccagcctcaacacggcctgttgcaacagtaccacgacctgtgatagagaatacgtcctctacaggcataacgaagtctttatctgtatcacgctgcggatccggaatgtactcatcaactgcagccataagctccataatcttgtcgccccactcgccgttcgggtcttcaagagctttcagagcggaaccctggataaccggaaggtcatctcctgggaagtcatactcagaaagaagctcacggatttccatctcaaccagctcaagaagctcctcatcgtcaaccatatcacatttgttcatgaatacaacgatgtaaggaacacctacctgacgggaaagaaggatgtgttcttttgtctgagccataacaccgtctgtagctgcaacaacaaggatagcaccatccatctgagcagcaccagtgatcatgttcttaacgtagtcagcatgtcctgggcagtcaacgtgtgcatagtgacgcttctctgtctcatactcaacgtgtgctgtagagatagtgataccacgctctctctcttccggagctttatcaatgttctcgaaatctgtagcggagttaccagctactctctctgccagaacttttgtgatagctgctgtaagtgttgttttaccatggtcaacgtgtccaatggtaccaatgttacaatgcggtttgcttctctcaaacttagcctttgccattttaaaatgtcctccttaaaacttgactcttttgtcagagcatatttttcaaagtaaacttgctatccttgattatattgcaaatcaaggatatttgcaagtattttattaagcgtctttcttggaaagaatcttttcctgtacggacttcggaaccggctcatacttctcaaagaacatggagtagttaccacgtccctgagttctggaacgaaggtctgttgcatatccgaacatttcggaaagcggaacgaatccacggatcatcttgcctccgccgatgtcatccataccttcgatacgtccacgacgggagttgatatcaccgataacatcacccatgtaatcttccggagttgtaacctcgactctcatgattggctcaagaagaatcggggatgctttctgcatagcatccttgaatgcaagagaacctgcaatatggaatgccatctcagaagaatcgacctcatggtaagaaccgtcatatacattagcatggataccaacaaccggatatccgccaagcataccagctttcatggcctcttcgataccttcgccaactgccgggatatattccttcggaatagcaccgccgacaacagtggactcgaacttatacagctcttcgccgttagcgtccataggctcgaatttaactttacagtgaccatactgtccacgaccaccggactgttttgcatacttgctgtctacttcaacagccttggtgattgtctctttataagcaacctgaggagcacctacgttagcctctaccttgaattcacgaaggagacggtcaacgatgatctccagatgaagctcacccattccggcgataattgtctgtccagtttcctggtttgtatgtgcacggaatgtcgggtcttcctctgccagttttacaagagcctcgccaagtttgccctggccggcctttgtcttaggctcgattgcaagctcaataacaggttccgggaactccatggattccaggataaccggatgctgctcatcacagatggtatcacctgtacctgttactttaaatcctactgctgcagcgatatcgccggcataaactttgtcaagttcctgtctcttattcgcatgcatctgaaggatacgtcctacacgctctttctttcctttagaggagttaagaacataggaaccggaattcattgttcctgagtatacacggaagaaagcaagctttcctacgaatgggtcagccatgatcttgaatgcaagtgcagcgaacggctcttcatcagaagagtgtcttacaatttcatttccatcaaggtctgttccatcgatagccggtacatcaagaggagacggcatatactcgatgattgcatcaagaagcttctgaacacctttgtttctgtaagctgtaccacagcaaaccggaactgctgcacactcgcatgtagcttttctcagtgctgctttcatagcctctacagacggctcttcaccttccagatactccatcatcagatcgtcatccagctcgcagatcttctctacaagctctgtacgatacagctctgcatcgtctttcatatcttccggaatatcaacgatagagatatcatcgcccttgtcatcattgtagatgtatgctttcatctcaaacaggtcaacgattcccttaaattcatcttctttaccaataggaagctggatgcagattgcatttttgcccagacgggtcttgatctgctctacagctccgtagaagtcagcgccgaggatgtccattttgttgataaatgccattctcggtacgttgtatgtgtcagcctgacgccatacgttttcagactgcggctcaacgccaccctttgcacagaaaacaccaacagcgccgtctaatacacgaagagaacgctctacctcaacagtaaagtcaacgtgtcccggggtatcaatgatgttgatacgatgctcaagagcacccggttttgctttgcagttttcctgcagagtccagtgacatgttgttgctgctgaagtgattgtgatacctctttcctgttcctgctccatccagtccatggtagcagtaccttcatgggtatcaccaatcttgtagttaacgccggtatagtaaagaatacgctctgttgttgtagttttaccagcatcgatatgcgccatgataccgatatttctggttctctctaatggatattctcttccagccaatggattttcctcctctaattagaagcgatagtgagcaaatgctttatttgcctcagccatcttgtgcatgtcttctttcttcttaacagatgcacctgtgttgttcattgcatcaagaagctcgttcgcaagtctctcctccattgtcttctcgcctcttttacgagagtacattgtgagccagcgaagagccagcgcctgacgtctgtctgctcttacctcgatcggaacctgataagtagcaccaccaatacgtcttgcttttacttcaagaagaggcatgatgttgttcatagcttcttcaaaaacttcgatagctggtttgccagctttttcttctactctggcgaatgctccgtatacaattttctgagcgacacccttcttaccatcaagcatgatgttgttgataagcttggtaaccactttgttattgtacatcggatctgccagaacgtctcttttctgagtatgtcctttacgtggcacgttacttccctccttaatcaatatgattatatcatcggtactcacttcaaaaactaaggtgttcgcactggtaaagtcctatattaacccgcaaccgacagggtatatggaataccgtacaaaatttatagccgttcgtgatcttacaaatgataaatatgatgttcctgtcctttatttatgatggaaatttactgcctgtctgatgatccgacagtggaatcctctcatttcagacgggaactttctcaatcgccctgcgaccgagactgatatctttaaagttttccctccctcttaaaaggcgggaactttctcaaacacttcatgctcgagaaatatcgcaaatttcttcactacgctacaaaatctgctttattttttcttcggtctcttagcgccgtatttggagcgggcctgttttctgttggctacacctgctgtatcaagagtacctctgatgatgtggtatcttgtaccaggtaagtctttaaccctaccaccacgaataagaacaacgctatgctcctgaaggttgtgtccctctcccggaatgtagcttgttacctcgattccgttggaaagacgaactctggcgatctttctaagagcggagttaggttttttaggggttgcagttttaactgctgtacaaacaccacgtttctgcggtgcagactgctctactgatttctttcttaaagagttgaatgtcttctgcagagccggtgctgtagatttctttacagtggtctgacgtccttttcttactaactggttgaatgttggcattccatttcacctcccgattattttctccatggattcccatggggttgtgcggttgctatttcgtatttatacgcacaaaaagaaatgcattcctgttgcacgcctgctcattatatcccgtaaaaatacggctgtcaaggtattttctgcattatttttaatgtaatcgccgactttttctcttttctcacatttcctcataggacatctcccagatatccgcgaacactgccagaggacagtcggtcagcagacacattaaaaggaaacattcatatggatttacaatataaatctcactcattccgcatttatggagaattgcctggatctcttccagaaaatgacggtatctgctgtaaggatcatcatcctgcatttcctgggatacgataaaaaactcaagggtgatcagatcaaagcgttccaccggaaacttatgattcataatgctgttgatccgctgtctgctgaaccttttctgactgaaatgctttgccagaatagaagctgacatttttttcagattacccattttattaacaggtatcccgctgcagattactttttccacatcggaatccgaaatatcagaaaccttccacaccttgccccgctctttttcctcctcgtccccctgatacatagaagcaataatttcctttgctctgttcagaagacggcagaattcctggaacgcctgacttttttctgacatggggtcatctgttccggcttttacatacgccagatactgaaacagcttttcctcgctgtcaagacacagtcctcccgaaaatactttggaagcctctgtgtaattctcatccggctccagctcactgtatctgtttttcagttcctccgccttgtgatatccatattgtttaaagtagcagtaccagtaaataacctcttccggattatggaaatcaaaatcctgctccctgagcactctggtaagaaaatccgaaacatcatctgcgctcattcgcagtccgaatcccagaagaaacaccgtttctctttttacagatgcctgagtaagccagttatttaccagggaagtcagctttgtggatgtaggcttcatggactttggcgtacaggtttcatgaaaagattctattacgatatctctgtaaatatcctgagttacatctgcaaacggttcttccagcccggctctctcataaatataccgtttcagatggtctccaaaagacaccagttccatttctttatacagataatgaaagatcacatctgcatcttcatcctcaaagccttccagacttaccacctgacgaaaacgctgaactgcttttcttgtaaactcaaaatcctccacacggtcaaaagcaaccgtctgctcaaaatccagatcctgcattcgatttttcatttttcatcaccctcatctcttttgtgcatcctgtccagcattttatgaaaccaggtcttttccggctctctgatctcacaaagcaccatcgttgcattatctctcccgccctttttcagcgcccgttcaagcagaagctccacagtctcctgaacgggaagctctcttgtgagaatatctgcgatctctccgtctgacagcatatccgtaagcccgtccgaacagagaaggtatctcattcccggatgtacctccatttttacaatagacggctccagcgccatgctttcttccggaatccctacatattgtgtaagaggagactttccaaaaagagagcctcccagaacatggtcacgggagactctccgaaactgactgtcctctgcctgataaattctgctgtcaccaagattacagccgtacacctggttcccggcaaatgcaagcactgccgccgttgttcccatactccggattttattttccgcactgtagtcgcacacagcctgattcatccgtatacaggcatttttcaaaaactgctccggatcctcggaaatttcctctctgtactgttcataatattctccgcaggaggatgcggcaatgtatgatgccatttctccacagctttctccgcccataccgtcaaataccgccagaagcggaagctccttttgagaaacgcttccacttctgatatgatccattccctgattctgtgcaggaagaagctctccgcagcaccagaagttgtcttcattattatttcgtattttacctatatgacatacataagcatattcaatgcgatacgctgtcttctgccactgcgccatcttctgtcctttctgccgacactcccacattcagttcagcttcgtactcttctgctttgttccagtatttttctgcccgctctctgtattcgtaattatctgtctcattatcatgacagatattattttcatctatccagcggatcatttctccctcatcataataataaagatttgccttctgctcgcctgtttttaattccggaaacacattgtgatctgcccacacatatgcaaaaaacagatctccgtcccagtaatagtattcttcataataaccatcctcagaaagctccggataaataaggactttcatcagttctgcttctgtaccttctgatttcagataactgatctttccttcctgttcagatccgatccagttatagtgattcagattttccgtaatttctgttgcctgagagccaatctttttcagtgtatcctgaagctgtttgttttctgcagactccatagtttcagttacagactgcttcagcctctgaagctctgcgttctctctgatcagccacacaaaaacactgactgcaatacacacagcaataaacattacaaccactgctgcaatcaggggatcaaaacgctttttctgtttttttctgccggaagttcctctctttctgcgattttggtttccggtttcagactgtatggttcttctttttgcagattccgtcttccggtttccggatctttcgccttcctgccgaagcacaatagtgcctcctggctccggttctccataatggactttttcggaaacaggctttctttccttttctctgatctgcgttttttttgcattttccgttttttcaggttcttccgtatgctttactggcgttttttgttcctgatatctgactgcttccaacgcctcccgaaattcttccggagtctgatacctgttttcacgtctgtacgcacaggcctttaaaataacctgcgccagcccgtcagcagcctctgccggtgcaggaagttcctctcccgacattcttctggtcagtgcattttctttatcacgatatgtaataagctgtttttccagatcaataaatggaaggcgattgtgatttcttaatcggtacaatacaattccaagcgaataaatatctacccgctggtcatagtcttcaccccgatacatttcaggcgccatataggaaaacgtgccttttttggaaagaccatttacatttctgtccagttccctggcgattccaaagtctcccagcttgaattccccgaatcttgatacaaatatattttccggtttaatatctctgtggatgatattctgtttctggcaatattccagagctttgcacagatcgattcccagccggataacttccttctctgtaagttccttgcccatacagtaatccagaaatcctgtcagatactccattcgaatataaatatcccacccgatatcatccagatattccacaaccttgtaatcttctactgatactacatgagaatttccacgaaaatactccatggtactgacttcctgaatacagtcttccacaaggctgtgaaaatattctttcactgactgttcatcaggattctcagaacggacactgctcagttctccctggctggaaggaatggtaataaccttgatagcagaataaaacgtcttcccctgtacgattctctgcgctttataaacctttccaaaagaaccttcaccgattttttcgatgatcttccattccggccataccgaaatcggaagctgtttttccattcctcttccctcccctcatgattgctgatatctgacagttatctgaaccaccttcagctctgtcatttatctgtcagcaaaattattgtttgaatttacccttattttctgccgataagtcattataacatgagcctttccatctgtctgtatttttcgattttattccataatttttcatatttttttaagatttacacaaactgctttctgaattcacctattaaagtcccttcttagaacagtctgtaataaattccttccatatatattctctctgcaaaaaacagatttttccccttatccaaaacatctgccggatacgccgagatcttgaacatgctaaagccatatatacaaaggaagccctcaggcctgtgagccattcggacttcctttgtattttatctgcgcatattctgcgctttttatttattcttcttcagaatcagcttcttctgtttcaacgaaattatcttcgctgctttcttctactgcttcttcagtttcagctgtctcagaggtttcctccggtgtaacatctgcatcattttctgtaatgtcctctgttacttcctcttcctcttcttccggcattcctgtgtcaagcttgatcgcgctgtagcgtttcagacctgttcctgcaggaatcagcttaccaatgataacgttttctttcagacctacaagatggtcaaccttacctttgatagcagcctcggtaagaaccttggttgtttcctggaaggatgctgctgacaggaaggaatctgtagccagagaagctttggtaataccaagcattacctgctttccttctgccggagtctttccttctttttcaagctgctcgtttacttcctcaaagtcgagaacatctacaagtgtgcccggaaggaattcagtatctccattgtcctcaatgcggatctttttcagcatctgacgtacaagaacctcaatgtgcttgtcactgatctcaacaccctggagacggtatacacgctgaacctcacggagcatgtaatcctgaactgcacgaacacctttgattctcaggatatcatgcggatttacactaccctctgtcagctcgtcaccagcctcaagtgtctgaccatccatgatcttgatacgtgatccataaggaatcagatatgttttggactctccgctttccggatctgtaacaatgatctcacgtttcttcttggtatcgttgataactgcaacaccaggaatctcagtgatgatcgcaagacccttcggcttacgtgcctcaaaaagctcctcgacacgaggaagaccctgtgtgatatcgccgccggcaacaccaccggtatggaaagtacgcatggtcagctgtgtacccggctcaccgatagactgagcagcaataataccaacagactctccaacctgtacaggctcacctgttgccatgttggcgccgtaacattttgcgcagacaccgactttacatttacaggtaagaattgtacggatcttaacctgatcaattgctccgccctctgcgtttacaccctcagccatgattctggctgcacgttttggtgtaatcatgtgatttgcttttacaagcacttcaccgtctttattcttgatcgtctcacaggagaatcttcctgtaatacgctcctgaaggctttcgatctcctctttgccgtccataaagcctttgacatacataccggagatctcgtctcttgtctcgcagcagtctgtctctcgaacgatcagctcctgggatacgtcaaccattcgtctggtcaggtaaccggagtcggctgtacgaagagctgtatcggaaagacctttacgagctccatgcgcagacatgaagtactccagtacgtcaagaccttcacggaagtttgacttgataggaagctcaatggtgtgaccggttgtatctgccatcaggcctcgcatacctgcaagctgtttgatctgcttatcagaaccacgggctccggagtcggccatcatgaagatgttgttgtacttgtcaagaccgtcaagcagggctcttgtaagctcatcgtcagtcttcttccaggtttcaacaacctctttataacgctcttcctctgtgatcagaccacgtttgtagttctttgtaattttatctacgatattctgtgcattctggatcatctcaggtttctgaggcggcacagtcatatcggaaatggaaaccgtcatggcagcacgagtggagtacttataacctgtggacttgatagcgtcaagtacctcagctgtcttggtagctccatgagtgttgataactttttccagaatctgtttcagctgctttttacctacaaggaagtcaacctcaagcagaagttcgttgcccggaatgcttctgtccacaaatccaagatcctgcggaagaatctcgttgaacaggaaacgtcccagtgtggattctacattgccggtaagaacagttccatccggcattgtctttgtgcagcgaaccttgatctttgactgcagagtgataaccttgttctcataagcaaggattgcttcgtttacgctcttgaagaacttaccttctcccgggtatcccggtctttcctgtgtcagatagtaaataccaagaaccatatcctgtgaaggaacggctaccgggccaccatcagacggtttcagaaggttgtttggtgacagcaggaggaaacggcactctgcctgagcctcaacagaaagcggaagatgtaccgccatctggtcaccatcgaagtccgcattaaacgcggtacaaacaaggggatgaagcttaatagccttaccttctacaaggatcggctcaaatgcctggataccaagacggtgcagtgtaggcgcacggttcagcataaccggatgttctttgataacgtcctcgagaacgtcccatacctccggctggagcttctccaccattttctttgcatttttaatgttgtgagaggtaccgtttgcaacaagctctttcataacaaaaggcttgaacagctcgatagccatctctttcggaagaccgcactgataaatcttcagctcaggtcctacgacgataacagaacgtccggagtagtcaactcgtttacccagaaggttctgacggaaacgtccggatttacctttcagcatatcggaaagggatttcagagctctgtttccaggaccggtaaccgggcgtccgcggcgtccgttgtcaataagagcatctactgcttcctgcagcatacgtttctcgttgcggacgataatatccggagcgccaagctccagcagtcttttcagacgattgtttctgttgatgattcttctgtacaggtcgttcaggtcagatgttgcaaaacgtccgccgtcaagctgtaccatcggacgaagatccggcgggataacaggaattgctgtcatgatcatccactcaggacggttgccggactcacggaaggattccacaacctccagacgtttgatgattctggcacgtttctgtcctgttgcatccacaagctctgccttcagctcctcagcatccttttccagatcaatggcctgcagaagctccattacagactctgcgcccattcctacacggaagccgtatccataggactcacgggcatcctggtattccttttctgtaaggacctgtttgtactgaagcccggaatcagccgggtccagtacgatatagtttgcgaaatataaaaccttttccaatgttctcggagagaggtcaaggataagtcccattctggacgggatacccttgaaataccagatatgggataccggagcagcaagctcaatatgacccatacgctctcttctgacagatgcctttgtgacttctacgccgcatcggtcgcacacaacgcctttgtagcggatttttttgtatttaccgcaatggcactcccagtctttgctgggcccgaagattctttcacagaaaagtccgtccttttccggtttcagagtacggtagttaatagtctcaggctttgttacttcgcctcttgaccactctctgatcttctcaggggacgccagtccgatcttaatggcatcgaaagtcattggctgatatgtttcattggtattggttgtttctgccatgtattctttcccctttctattcttcgtcatcaagagtttcgtcaaagtcaaggaatgcatcttcctcttcttcgtcttcctcttccacatctacaagttcttcaccctcgaactcctgctgtgtataaccgtgcttgccaaaggattcctcttctctgtctctgctgtgtctgtctccctcgatcacggaacgaagatctgtatcgccgtaatccacggtttccataatctccacctcagtgttgtcatctctcaggaccttaacgtcaagaccaagagactgcagctctttcagcagaaccttgaaggattccggaattcccggctcaggaatattatcacctttaataattgcttcataagtcttcacacgacctacaacatcatcggatttaactgtcaggatctcctgcagagtataggacgcgccatatgcctccagagcccaaacctccatctctccgaaacgctgaccgccgaactgagctttaccgcccagaggctgctgtgttaccagtgagtatggacctgtagaacgtgcatggatcttgtcgtctaccagatgatgcagtttcaggtaatgcatgtgtccgattgttacaggactgtcaaagtattcaccggtacgtccgtcacgaaggcgaaccttaccgtctctggaaatcggaacgcccttccacagttctctgtgggccttgttctcatccagatactgcataacgtcaggagcaagtacatcctgatattttgcacggaactcttcaaagtcctctgtgtttacataatcatttgccagttccagagtatcctgaatgtcattctcgtttgcaccgtcaaataccggagttgcaacattgaagccaagagcttttgcagcaagacttaaatggatttccagcacctgtccgatgttcattcgggaaggtacgcccagaggattcagaacgatatccagcggacggccgttaggcaggaacggcatatcttcaacaggaagtacacgggaaacaacacccttgttaccgtgacgaccagccattttgtcaccaacagaaatcttacgtttctgagcaatataaatacgaacagactgatttacaccaggagaaagctcgtcaccgttctctcttgtaaatactttagcatcaacaatgataccgtactcaccatgaggaaccttaagggaagtatctcttacctctctcgccttctcaccgaagatcgcacggagcagacgttcttctgcagtaagctctgtctctcccttaggagtaactttacctaccagaatgtctcctgcacgaacctcagcaccgatacggatgataccgcgctcatcaaggtctttcagagcatcgtcaccaacgcccggaacatctcttgtgatctcttccggtcccagcttggtatctctggcttctgcttcatattcttcaatgtggacagatgtataaacatcgtcctgaacaagtttttcacttaaaaggacagcatcctcgtagttgtagccttcccaggtcataaatccgatcagcgggtttttaccaagggccaactcaccattagaagtagacggaccgtctgcgataacctgtcctgcctctacatgctcgccctggaacacgatcggcttctggttgtagcagttgctctggttacttctgaggaattttgtcagatgataatcatcttttgttccgtcatcatttttgatgctgatatctgtagatgtggagcgaagaactgtaccggccttcttagccacaacacacacaccggagtcaacagcagtctttgtctccatacctgttccaacaaccggagcatcggtggtcagaagcggcactgcctgacgctgcatgtttgatcccatgagcgcacggttggcatcgtcgttctgcaggaatggaataagcgctgtagcaacggaaaataccatcttaggagacacgtccatgtagtcaaacatatgtctctcgtattcctgagtttcctcacggaaacgaccggatacgtttttatgaatgaagtgtccttcttcgtccagaggctcgttggcctgcgctacatggtaattatcctcttcatcggctgtcatataaacaacctcgtcagttactaccggattggacgggtctgttttgtcaatctttctgtacggagcctcaacaaaaccatactgattgattcttgcataggaagcaagagagttgataagaccgatgttaggaccctcaggagtctcgatcggacacatacgtccataatgagaatagtgaacgtctcgaacctcgaatccggctctgtctcgggacagaccgcctggtcccagggcagacagacgtctcttatgggtcagctcacctaacgggttgttctgatccatgaactgggaaagctgtgaagagccaaagaactctttcactgccgctgttaccggtttaatattgatcagggactgcggagaaatattctctgtgtcctgagttgtcatacgctcacgtaccactctttccagtctggaaagaccaatacggtactgattttgaagcagctcacctacagaacggatacggcggttacccaggtggtcgatgtcatcatcatttccaaggccgtattccagatgcatgttatagttaatagaagcaagaatatcttcttttgtaatatgtttcggaatcagatcatggatatctctgcggatcgcatccttgatatcctcaagactgtcattttcttccagtattttttcgagaaccggataatatactaattctgtaacacccagttccttcggatcacagtcaagctcaacatgagcagaaagatccaccataaggttggaaagaaccttgatcttgcgatcctcttctccctggatccatacaaacggagcagcgctgttctggatcttgtcagcgatctctcttgtgatgtttgtgccttcatctgcaaggatttctcctgtagacggatccacaactgcctctgcaagcttgtgtcctacaatcctgctgttaaaatgaagttttttgttaaatttataacgtccgactttggcaagatcatatcttctcggatcaaagaacattgccatgatcaggctctctgcgctctccactgccaacggctcacccggacggatttttttgtataattccagaagaccttcctgataatttgtggaagtatcttttgtgaagctggcaaggatcttgggctcctcgccaaacagttctacaatttccgcattggtgccgataccaagggcacgaatcagcacagtgatcggaacctttctggttctgtctacacgaacataaaaaacatcgttggagtctgtttcatattccagccatgcacctctgttgggaattacggtactggaaaacaaccttttaccaactttatcatgtgcgattgcataatagattccaggggaacgtaccaactggcttacgataacacgctctgcaccgttgattacaaatgtgcctgtttccgtcattaacggaaggtctcccatgaaaatctcgtgttcgttgatctcttctgtttctttgttaatcagtctcactcgaaccttcaaaggtgcggcataagtcacgtcacgttctttacactgctcaattgtatacttcgcatcctttgcgtcaaatgtaaagtcgatgaactccagactaagctttccgccgtaatccgcgattggagaaatatcatcaaatacttctttcagcccttcatccaggaaccatttgtaggaatctttctggacttcgatcagattcggcatatccaggacttctttttgtctctggtagctcatacgcatgctttttccagtttttacagaacgaattctgtttttttccattgacgtttcacccctgtttttttatttattacaacatgatcctgtttatattttcaggtaaacaggcatatcttgccataatatagcatttttcactataacatactgttgtcaacctgtcaaccagattttcaaactttttttgatcacctttttcatttgccggcaagactgatacagaatatactgttttcccgataaagtaaaaaaagaaacgcaggaacacctgcggcgtccctgcgctgtctcttctgttcagactgaattatttcagagtgatctttgctccctctgcttccagttttgtcttgatgtcctcagcctcagctttggaagcgccctctttaactaccttcggagcaccgtcaactacagctttagcttctttaagtccaagacctgttacttcacgaacaactttgataactttaactttgttcgggcctacttctgtaagctctacgtcgaactcgtctttctcttcagctgcctcgcctgctgcgcctgctgctgcaactacaacgcctgctgctgcagatacgccgaactcttcctcacaagcttttacaagttcatttaactctaatacagataactctttgattgctgcaataaattcttctgttgttaattttgccattttaatttccctccatataatattattttaatttataccggttcacagtgctatacgaaaactgtaaactcttccgcacgctgtctgcgcattgtaaatctgtccctgacaaatttactcagcagctgctgcgtttccaccctgtgcctctgcaatctggttaagcacacgagcgaagtttgtgatcggagactgaatgcttccaagaagttttccaagaagttcttctctggacggaatctgggaaagtgcctggattccagcctgatcattgtagttgccctcaactacacctgcgatcagctccagtgccgggaactgtttcgcatatttagcaaggattctagcaggtgctgttgcatctgtagcagagattgccagtgcgtttgtaccttcaagatgtttggaaaggctctcacagtctgttccctcaaaagcacgtttcatcattgtgtttttgtaaactttatactgaacaccagcttctcttaattccttacgcagaatagtgtcctgctcaacagtaagaccactgtagtttacaagaactacggactgagcgtctttaatgctgtttgcgatttcttctacgattggttgtttcagttctacttttgccataaatggtacacctccttatagattttgatataccgccgttgcaatggatactgagataaaaaaagccctactgtaccatgacagtaaggtctcctgtaatcttatcagaatactaagtcctcggtaggcgttttgatccttatgccttacggcacctactgtcttcggcagcgttctgtaatagaataacacggagaaaagttcatgtcaagatattatttaaaaattctttaattctttaataagtcttttggtcaggccctaaaaaatatgttatactaaacaggggatttctatatattataactgcgaaaggtacggtactttatggttcagatatgccggaaagataaaaagttggtttacgaaaccatacgctctggaaatataggtgctgatgaaatatccattcctaacctggttgatgatattctccttacttttaccattttgggcatatgtaagaatacgcgttacatttgtattaagattcgtaattttaatttcgtttatactcataatcgtacattccttcctatataattaaatcttttttccttgaaaatcaaggattatttaatgtttcatgaataaataccccagaaaaaggatacatggaagcggtcatttctctgtatcatattttttactaaccatctaaagtcagtaatcttatcttactctaaaattttctcaaccttctttcttaaaattccttatatttttttgaattatataaggatctcctgtgctttctatatttttgtaatttaggatcctaacataaagatacccaaaacaagcttggtttcccagttctgtcatgttacattttttatcataaacgcttccatttattttattcctttataaaacagcaaatgaacaaatttgaaaaagtgcataaatccccgttgttttgtctttgcaggatacacatatagaatttaaagtttatctgtatctacatattatggattctattgcgcaaaattctgtattatctcatttatagttttatatactaaactcaaatgctcaaaacaagatattactaattattatgatctccccggggatcgctgcacagaagaagagcagcttatagagctgataaaagaatacgcagccaatgattttcgcgaaaagaaatgctacagcgatatgaatcagaaatattttgcatatcatgaccgtaataactgtaaacgaacctatgaatttatcctcaaaaactgccaaaagtaatcactgattactgctttctgtcgtgatctgcagcgcccccggcaacataccgggggcgctgattatataatatctttttattttctctgatagctgctgttgattctgcagatgaaacttacggcagctgagagatcagagacggattcaatacccgcactccttcttcacccagaatccgctccagaaaccctgtatattcatcataagtcagacttccatcaggagtcagaagctcaaaatctgttccgtacacatgggcaaaaagtcctgtctctttcagaccgtttctcagatagaaggctttcctgcgctttctgtcctgagcattctctgctttttcatcctgcatttcgatttcaaaaatatatttattactgcggaatcgttccagtaaaagcttcaggcttttacttccatatccaccgtttcttttttcaggagaaacagcaaaataatccaacagcgcagtatttccatccatcatattaaaggcaagtcccacaaactcatcctgatctgtcactgcaaaaagctccatctgtcccttttccgcaagatgctccataagagagatcggctttttttcttcagcaggaaaagcttcttcgtagagcatataaacctgttctttaaattctgttccgtttttcagtatgttttttaattccatattttattccttttctgagctgtcagagcagcccttctctatatttttataagttttatcgcccggatatcaggcatttcctcaaacctttccggtattctttaaaactccggccaggacagaatctctctggaaatctgagcttcataatcaccttctacgtctatactccgccctgcttcataaatatttgtctcggcgccccatacgtcgtcatgatactcccacacatgaaaactcagcccccggaacataaagtcaagacttccgcacccgtcctcttctgtataagtaaaagagatattttttctgttcagcgcatcctgcactgtttccaatctcataatcctgcccctttccaatttcattttgtgcctgtaattttaccccttgtatacagcgctgtcaatatgtctccggatgcttgcataagcccttataatgctttatgataaaagaaaagtctgtctgaaaggagatctgccatatgacgtcaaaacctgtttttcacggaagcgatattgaaaaaatctgcagcttctaccatctgaaaaaagaaaatatcataaactatggagcaaatgtgaatccccttgggcttccgaaaaatgtgcagaaagagcttgcctcacacctttttcttctttcttcctatccggacagagaatattcctcactgagaaatgccctgtcccagtactgcagcataccctctgactttattctgcccggcaacggatccagcgaactgatctctcttctcattgaagctgtaaatccccggcatacgctgatactcggtcccacctactctgaatattccagggagctttctttttccggaagtactgagacctggtatcatctggaggattccagcgattttgctctggatatccaaaatctctgtcttaccctggaaaaagattatgatttcctgattatgtgtaaccctaacaatcccacttcctctgctgtcacacaggagaaactgcgaaaaatccttaccttctgccgtcaaaaagaaatttttgtaatgatcgatgaaacctatgtagaattcgcccctgatccgcagcttattaccgcagtaccccttaccagggagtttgaaaatcttatggtccttcggggcgtatcaaaatttttcgccgcaccgggcatgcgccttggctatggaattacagggaacaaagaacttctctcaaaaataaaaaacagacagattccctggtccataaacagtctgggagcctttgcaggagaactgcttgtacaggacaaagactatatttcccgtacaagacagctgattttaaaggaaagagaaaaactttatcaggagcttctgaagctttcttcttttaaagtattccctgcctttgcaaacttccttttactgaaaataatcaaacccgggctcactgcctccaatgtatttgaggcatgtatccgccaaaaccttatgatccgtgactgttcttctttccagtgtcttgacggagaatttgtccgcttctgcattatgctcccggaacataacgaacagcttctgaacgtattaaaagggctgtaaaagcccttttaattcatgctatatcgctttaaaactatatttgtgaggcagttctccctcttctccgaacagttcaggatttccccgggaaggggggctgcttttcagtcttttttgcagaagcgtaaggcaggctgcagccgttcttatctgcaaaagcagtatagaacacactgtttccgccgcagtttttttgcttttacagaacacggtgcagatacttttctctggtcgccagtcctcctctgatatgtctctctgacttattcttatccagaacctggcgcacctccgccgccagccccggattgatctccgtcaacctgtcagaacagtctttatgtactgtactcttactgattccaaatttttttgccgcctgccttacagttgcctttgtttcaataatatagcctgcaatctccactgcccgttcttcaatgtaatctttcaaaggaaaatcccccgaaaacgctgtttttacaatgtatgctgtattatataaaatgtattccagttcatacctcaggaatcagaagcccgaagcatataagatcatgttgccgcacataatccgaaagagattgtagctctcttctgtaaaaactgtgcttcggaataatataaaaagtctgtaaagtccctctgatttttttaatccgggcttgacaaacccatactgcaggactacaatgggataaacaattaaataaacagtttcggtaggtgaggctaccacagggatttggattttcctaagattgctgccgcaaaaacgtggagacacgattcgctggtcagcaggatatgtcgcagtcaaggcataacctaatgcaatttttacgccctgtgatgctaaagcttgaacgatgtttcacaggaaaaatatatcctgtcattgctcaggcgatgacaggattttttattcctcaaaaatcaagggattcagaaagttttaagcggacctgtcccctttgttctgaaaaaggaggtgagaaccatggaacctggagccagttgtcagatcattatattaaagaaaggactgaagaattatgatgaaaacattactgattcacacaccggaaaattatacttctgtcagctctctgacagagccaaaagctgtacaggagtccatggaaaagcatgaaacctcctattttgagacttccgtactgacccatgccagaaaacgctttatgtggcttctttttctgatgctttctgccacagttaccggaactattattaccagatatgaaaatgccttttccgcagttcctcttctggtttcctttattcccatgctgatggataccggaggaaactgcggttctcagagctcaaccctgattatccgcggtcttgccctgaacgagatccgtccccgtgatgtttttcggattgcatttaaagaatttcggattgcgcttctggtaggcacagggcttgctgtcataaacggaatccgcattctgattatgtacagagatcccagacttgctctggtagtttctctgtctctgactgctactgtaatcctgtccaagatcatcggatgtattcttccgcttggcgcaaaaaccctgcatatggatccggcaatcatggcatctcctctgatcactacagctgtggacacctgctctattattatttacttttacattgccacaaggatctttgcccttgctgtgtaacctgtttattccttctgaagatcaacgatcctggtacagaccttttccagaagctccgggctgtggctgactacgatcattccaattttgcgcttttcggtttcatccataaggaaatgccagatctgactctgtgtgatgagatccagcatggtgctgatctcatccgccagaaggaactgtgtcctctgtcccaacgctcttgcaatacaaaacctctgcatttctcccccggacagctctgccggaaaacggttcatccagtctgcctcaatgccaagtcttttgataaggtcaggagatacattatccccctcctcaagcaccgatttcattcgcagcctgggattaatggcctgttccggatgctgccagatcaactgaaccggacagtaggagccatagaaatcaagaggctttccgtccagcagaacctgtccgctgtcaggcttctcatatcccgacagtattttacagagggttgtttttccaaatccgcttggcgccacaagccctacccgctctgtactctctgctttcagactgaaatcttttaaaatttccctgcttttttctccatatcgaaaagaaatatttctggcttcaagaatcatacacgcacctcacatatcctccgtttacttccctgtagggaatttcccctctgcatttttctgtacatttttcacaccttggagcaaagggacagccctccggcatatcttttacatagggctgtaccccgtcaatataatgaaagccattttgaggcattgctctccataaggcttttgtatagggatggcgcagcgttttttcctggcgaaaatcctctgtttttgcatcctccagagtgtatcctgcatagaaaacaagaactctgtccgcagtttccagcgcaagctccagatcatgggtaatgatcaatactcccgctcccatatcagccagctccctgaaatgctccatagccctctttgccgctttcaggtgaagtcccggcgtaggttcatctgcaataaccagcttcggctcttcgatcatcgcagtggatatcatcactcttctggtcattcctccggaaagctcaaagggatactgttcctgaacttcttctgccagaccgtaccgtctgaagatcccgtccagcttcttttttctttcaggatcctttttgcctttgcagatctgcgttcccaccttcatcagaggatccaggtaggaagtgctctgaggaaccataacaatctcttttcctctgagagcgcagattcttttttctctaagaggctctccacagtaaagaatctgtccgcccatttctgcattatagggaagaatccccattaccccatgagccagaaggctttttccggaaccggaagaacccacaacagccaccatttctccctgatggacagtaagactgagatctctgatcacaggaagctttgtctgctttgtgcccttctgatactgggaaaaggaaatattcatatttctgatttcaagtattgtatttttttccatttcacccctcctattcatgagcgctggcaggatccaccagcttccggataccctcgcccacagtataaaaacacacaactgtcagaaccagcatcagtcccgggaacagagccagccaccactttccggtaatcagatatttcattgcctctgacaggataatgccaatggcaggctgctcattggaaagtccgaagcccagaaaagtaatactggattcgtgaaggatcgcatgaggaaaaagaagtatcagacctaccagaaactgcggaaaaagatgaggaaccatatgcttcatggcaatataaaaattacttttcccaagctttctggccattttaatatactgctgctcttttaactgcagaacctcaccccggatcagccgggcaagggaagtccagtgggtcagagcaacgcccagaatcacgcccttcagcccccgcccgcaggcaacgcagatcaggatcagaagaagcatatgagggattcccataacaagatcaataaaccaggtgataactgtatctaccgcttttcccattgttgcagacagaactcccagaataaaggccatcaccgcactgaaagccgcggcgctgatcccgataataatactgatggaaagccctttaaccgtccgggtaaacatgtctcttcccagccagtcggttccaaacggatatttcaggcagggagcaatatttttacgggcaaaatcagtttctctggcagcatctccacaaaacattccgccaatacacacagcagccagaaagatcagtgaaagaacaagccacagtaccagcctttgcctgcggttccatttttttatcataaacgttcctttttttgtgttttttgtcattttgcggcacctccacgtctgatacgcggatcgatcacaccatacagaatatttgcaatgagatttccgccaaaaacaaataaagcgctgataatagtaatcgccataagaagcggcatatcacttccaagtcctgcgcttaccgccgcctgtccaagtcccggataggaaaaaacctgctctaccagaacagaaccgccaaaaatttcactgatggaagcaaactgcagggtcatggccggcgccagaacatttcgaaatccatgattcctgaaaatctgccacaggctttcacctcttgctcttgcaaaaacaacataatcactttcacagatatcgaccattttttctctggtatgcatggcaatattggcaattccggtaatggacagcgtaaccgccggaagaatggcatgatataccctgtccagaaaagttacgccgcttgcctccacgcctatgggtacgcttagccctatgggaaggatcttcagccacaccccgaagatgatcagaagcagcatggcgatccaaaaagccggggtacttgatattaacagacagtagccttttactgccttatctacaaattttccacggttcattcctgccagggcgcccagggcaaagccaataagcccggacagaacccaggcaataatcataagaaaaagcgaatttcccagttttactgcaattacctttgccacatcctgtctgtaaagaagagaaacacccatatctcccttcagaaaatccttcagccacgccagatatctctgaaccggcggttctcctactccccagtattcttcaagctttgcaatctgctcctggctcatgcttcccagcgcagcctgtcccacattggcctgaagaggatctacgggagaaactgtcataagagcaaacgctgcaatactgactgcaaaaataagaagaaccatcttcacaaaatttttcagtataaactttcctgctgtatttttcaatattttctccttgtacataaatcgtttgaaacgcacagtatccggcagcttccggggacgtttttattcctgttacagaacaaacctccccaaaatcctgccggataattattttatacgtaattttattaaactttcggaattactcccatgtccactgatccacattatttacaatagaccagccatgtccgtgaggatgaatcttctgatctgcaactttaagtccatctcttacaaaatacagatgatccacattgcacagccagatccagggaatatctccctcctgggtaatacctgtttctccgtcccactgagcctttttccacagctcgtaggattcctcaagatcgctgctttccagagcctcgtccatgtatttgtctactgtctcattggcatacggtgaatattcagcagttcctgtttcttccattgtatggtaaatattgtaaagctccataggagtgtgcgctccccatccccacatcagaggctgagacaaggccgcagtataggcggtatcccagtcagctccctctgtagtaacagaaattcccagttcagcaagctgattttttgcatcctcagccagagcctgacgtacagaatcagatgccggataaacgatcttcatctcagcgcgtacgccgtctttttcgcggattccgtcttttccttctttccagccggcatcctcaagaatttttaccgctccctcaaaatcgtactctgtttctgcctcctcgttataccagggcattttgtcacatacgctgtatgcgggagttccgtagccgttcagtacattgtcgatcatttcttcacggtcgattccaatgttgatcgcgcgtcttacttccacatcgctggtaaaatcatttccggtcattactccgtctttttcttctgccggagctgccggaagattaaatccacggttatcaactgtatctacacggaacagctcatatccctctatttccgtatcagaataggaagctgccgtatgcgctacgtctaccgttccggactgagctgccgcaagagccgcgtcctcttccataaaaagaaccgtaacctttttcatctttggttcttctccgtaataatccggattggcctcaaagatcacctgctgccccttatcccactgcttcatgatataacgtcctgatccaacaggattctgtccgtaattctcgtcatatgcatgttccggaacaattcccactacagccatagtatacggccagatggaaaaaggcttgttcagatgaaactctactgtggtatcatccactgcaacggcttcctccagcatggaaaaatcattgacagagctgttgtcgcggcagttattataggtaaacgctacgtcctttgctgtcagtggttctccgtctgtaaattttacatcgtcacggatctttactgtccagataagcccgtcctcactgacagaataatctgtggcaagatccattccaatagacagatctttgttggtaacagtaagtgtgctctgtatcagaggctcatgaacatgctctccggccccccagccatatgcaggatcaaatcccgcttccggctcagaagttgcaggcatggtaacaatcacttcatcctttgttttctgttctgctgctgaaaccactgtgccgcttccgatcatggaaacagtcatacagaaagccgccagcagtgccattaaccgctttttcatttgatttaacctccctgattttcgtgtttcaccagtataacattgattttcgtcagatttaaccctgtacgggggatataaacccattcatattttgcatggataatctttttttttcatacctgtacatccccctgggaggcttgttaaaatctctgactttgttaaaatatagtcagcacaggaaattgtgttatatgatgtcaaagtcagtgcacgacctccacttatgatgcactaacgatcccattaaaatactcatttaaaaaaagcacctgtaacaagtgctttttttaatacgtttttttatattttaccggtctacaaaacagactcgatcagatttctggtgtactcctccctgggagaccatataatttcctccggagttccggtttccacgatttttccctgtttcataacgatcacccggtcgcagaacatctgaaccagagcaagatcatgacagataaaaattacgctgagaccgtttttctgtcttaattttatcagaagctccataatctgtttctgaaccgttacatcaagggcgctggtagcctcgtcgcagatcagaagctccgggtccagcgcaagggctctggcaatagcagctctctggcactgtcctccgctgacctgatggggataccgggaagcaaattccggcgtaagcccacacaattctagaaggttatccacctttgtttttaattccgttccctttatccccatattccgcagactttccccaattccgtctccaagtgtccttcggggatcaaaagactccgcgggcatctggaaaaccatctgcatatgacggtatgcctgtttcagctgccgtattcctgcctgagatatatctatacatccagactctgttccttccgatgaaggataaaacagaacttttccctctgtacagggaagaagtcccgtaatcagtctggcaactgtactttttccgcttcctgattcacccacgatccccagacactgtcctcttttcagttcaaaggacacctcgtccacagctgcaaaggatttttttcctgctgtaaatacctttttcagtttctctgctttcagcaaaatttctgtcataatttctgattctcccgtcttttcagccggatcacagaatccataagctgacgagtatactgactttccggattttccagaatcttctgtgtatctccgtaatccattacttttccattctgaagtacgaggatcctgtctgccatttttctgaccacgccaatattgtgagtgatcagaagcatggctgtatgaaactcttttttcatcagaagaagctcttccaccacctgtttctgtacagtcacatcaagagcgctggtaggctcatctgccaggagcagatccggttttaaaagcatggcggtacagattcccactctctgattcattcctccggacagttcaaagggatagcttccaagaacacgggcacagtctgtaagtccgatttttttcatcaaaacagctgctctgttttccacttccgctctgctgaccttctcatgctccgatacggcctcgtacatctgagcccctactgtacgcataggacaaagggctgatttacagtcctgaaagaccattccaagctcaggtccccggtatttcctcagtattttttccggcatggcagtgagattttctcctttgtaccacacctgaccggcgacttcagctctgtttcccagaagtcccataacggcttttgcaaccgtactttttccacttccggattcccctacaatacccaggatttctccctttttcacctgaaagcttatgtcctgtacaacaggctctccatcataacagacagtcagcttctccacacggagcagtgcatcttcattcttttttacattcattctgcgtcccctgttcccggaatcagttattccacatccagatctgccgtgatctcataataatcacagggatgagctgccattccctttacattggattttgtcacaattcccatattgagatgtgatacaaagaaaaatccatcgtcgtccagaatcttctgctgcagctctgttgccagctttgctctctcctccggctcaaatgcctgatgaagcttttctgtaagagctgttacctctttgttttcatattttccgtagtttttgggtcccactactgtactggtaaagaaatattccggatctccggtgggagctgtggtagtagaacttacatacacatcaaagttgccgtctgccgcataagtcatatgatccgaagtattatttaccacaacgtcaattccgatttccttgagagttgcctgtgcatactccgcaagcttcggctgctccagacgggtcgggtaggtcagccagtctatggtaagcttctgtccgtccttgtctgcatatccgtcgccgtctgtatccttccatccggattcttccagcagcttttttgccccttccggatcataggaaactgtttccactgcttcatttccataagaaaaactgtccggaaaagcggctttggcagggagccctctcccctccatgatcacagagcagaagccctctttatcaattcccatttcaatggcttttcgtatattctgatcctgcatgatctccgactcaaaattaaactgtccgaaaaagcatctgcttgttgcgcaggaattaatggtatactccggatttccgtcaaaaagcgcgtagttatcatactgaagaccataggttccctggatatcgcctgtctgaagggccgcggtcagagcgcttccgtccgaaaaagactttactgtaactttatccacctttacatcgccgccccagtaattttcattttttacaagatcaatctgagtgggggtaactttttctgcaatataaggacctgttcctgccacattggcatttcccccttctccctgaacgccatattccatatcaataatggctccgtagggatctcccagatagttaatgattgccggacatggttctgttgtgtaaatagtcaaagtcagtccgtctgcatcaatataatcgatcttcatatcagaaggagcccggtcatgaacctttaccagattttccagacattcctttactgcctgggcatccatagtgcggccgcttgaaaactttactccgtctctcagtgtgatctttaccgtagtgtcgtccacaaactcataatctgtggcaagccagggctccacctccatattgtcattgtacttaaataacgtttcccctacaccatacctgagcgcactccatccggaataattatcatgagggttcagcccggcgtcacccatttcctcgctgtaaccggttgttccgtatacaaaggtcttttctttgtctgccattacgctgacactcagtcccgatatcatcactgctcctgcaagcactgcagcaataaattttttcttcattatttacctcttttctttttgtgttccggatccagataatctctcaatgtatctcccagaaggttaaaaatcagtaccgttacaaaaattgcagctcccggcgcaagagacatccacggcgcgatctgcagaaggcttctgccctcattgatcatacttccccattctgctgccggcggctgtactcccagtcccagaaaggacaagcctgcaagctccatcatcatagttccaatatccagaactgccgttacaaggacagggcctgcaatattaggcagaatatgccgcagaagcagagccggtgtgctgctgccggaaagtctggccgccattatatacggcgcctctttctgagtcagcgtcagtcctctggccagcctggcaaacttcggccagcttaccactgccagagcaagtaccgcattctgtacaccgccgcccaggactcctgccacagctaatgcgaataccagacttggaaaggccagaaacagatctgatatcctcataagaaaagcatccacaaagcctccccgccagccgcagataattcccacaaaggttcccgttactgttgtaatgctcaccaggatcagtgtggaaaaaatactggtagttccggctatcagaatcctggaaaacatatcccgtccatagcggtctgttcccagcagatgctccggccccggcggctgctttgccaacagaagattctgctcataagggtcatagggacagatgtattttgcacacagagctgttaaaagaagcagcgctgccagaactgtcagcacaataagccgtatttttacagaatctgttcccgtcctgtacacagaagatgaacctctctttttctttgtcatccttgctcacctcccagtcttacacggggatccagataatgatacacaatgtccgtaatcaggttcactgctacatagatcactgccatccatgccacatatacctgaacgacaggataatctctcatggtaatggcatccacagccattttacctacaccgtcccacataaaaatagattccacaatggtagttccgcccagaaggcttcccacagacaatgccatcagcgtcacaatagtcagcatggacgccctcagaacatttttccagataatcacacttcctctgacacctctggccctggctcccgtcacataatccttattcagttcctccagaacagccgctctgatctgacggatatattttgccgccatagctatggcaagggtaagagtgggaagcacaagacttgccgcaatattttctgacgtaatcacaggcagccatccaagctttacagaaaatacatacattaaaatcagcgccgcaaaaaaattcggggcagaatttccgataaaactcagaaaacgtatcagataatctgaccatctattatggcgtatggcagaaaaaatcccaagggggatcgctgtcagcatagtcactatcatagaagaaactgtaagaagtatggttgccggaagcttttccataaaagtatcatataccttctgcccggatacatagctggttcccatatcgcctgtgaccattcctgcaaaccatctgccatactgtaccagaaaaggctgatccagaccgtattctttttttgtctgatcaattacctcctgggagacaactgaccctgcattttcatacatgtaggttactgcatctccccctgcaagccgcatcatggcaaaggacagaaacgtaatcccgatcagaacgggaattaactgaagcagtctttttcctatatatttcaacataattttatcctctgtttatctgctttttcatcattttacttaccgcttccgattcgttcttccagaaaacagatgaattcctttaaactgctgtccatctcttctccccgatgtctgacatacccgaagatcacccggcttccttccattttcaacgggattccgggaagtgtatctttcttattctctgacagatagcttccgctgatatttgccacatcactgttttttaaaagcctttccataatataatcgctgtttgtaataacagaaatatccaggcctttccaggaaaagctctccttgttttcggcggctccaatatcaaaaaattcgtcctgatagttctgaaccagccgaactccgtcaagctcttcatagctcaggctctctttttctgttccgtaaagaaaggattttcctcccggataaacaatggcttctgtttcatgcaggggaataaattccatcctgtttctggacagttcataaaaaaagtcctctttctgccgttccagaatatacacaaaccccacatcatccagatagtcccggacgcgttccatcactgtccgaactcctgccgtgtaaatctgaaaatgataatttctgtcataattctcattataaaaatccacaaactgagtggcgaaccaagagcttggatttgccgagatcctgagccattttgtcataccgtggtccgccatggcttccagctttgtgacttcgcctacaattttacaggcataacgatatacctgacttccctgaggcgtaagacggatccctctgggaagccgctcaaaaagctgcattcccagagaatcctccaaagcctttaccaccttgctgacactgggctgggtggaatataaaatttttgccgcctcgctgacagagccggtctgagcgcaggtcacaaaatactgcagctgttttaaatccataattttttcctttatagttcttttacttacaggttctcagcataaacattggtgtgggattataaaactcatccttttccacataaatcctgctactgattcccagatccacagaaaattcctgaagcttcattgcccccagagtctccagatcccaggctggacggctgtaggaactgattggaagctgacgtttgatctcctcacattctctcatcatatcatcgccaatttcctgatgcgcatggttgtccggaagctcgcacaggtctgtaaaatcactgagtccgtaatttgcatcaaaattcaaaagtatgccgccttttttcagtacacgcacccattctctgtaagcgctttttacatccggcagggtccaggtaaggtttcgggaaatcaccacatcaaagctttcgtctgcaaatctcagattttctgcatccattacaaagaactcacagtctgttttttcctcttctgcaagcgttctggcattttcaaccatatcaggcgtcagatccacaccagtgacctgatatccttcttttgccagaagcacggaaaaaaatcccgctccgcagcccacgtcaaggaccctgagatttctgtcctgaggaagctgattttttatttcataaagccatcgttcagacataggactgtgaagctccgcccttttatgttccaggaaatctccgcttcttttttcccagtagcttacaattcgctctttccgctcatcatagggattgacaatctttccataagcgatcatcggcccgtcccccagtacctgaagcgtgccggtctgatacaggatcacaccgtcatactcggccacgctcagctccagaagaccgccttcataatcccgcacttcacccagaatctctccttcccggatcatatcgccgggctttttaaagggataccacaacccgtcccgggaagcgtcctgataacagatatctgtaacatccagaggataataagttctgtaatcctttttcccctgataaattcccagatgacagagaatattcctgacatctcttcttgtagagcgtacttcttcactggtccaggctcccataccgccccgctcaataagaatactggggattccctgagaagccgcatagttataagcgccccctgacgccacattggagcggaccatgtaaggtacgtccacctgctctgccatgcgtcttgactgactgactgttttttcatctgccatgcccgcataatacacataagaagtcagctgttcatagtcatccccactgtgcaggtcaatgtaataatctgctgccggctgaagctcatgggaaactgcccatgcaagacgttccatttctgtaccttttggatttccgggaaattccctgttcaggttttttccgtctgtcagtcccatacttccgtttctccgctcaaacgccggaacatttatcaccttaacaatgattatggtacctgccaccttctgtatcttcagtttctgcgacagctcaatagcagcctgtatccccacatattcgcccccgtggactcctgcagtgatcagcattgtttttccaggtcttgttccatgaagcacggcagccggaagccggaattcgccctgtcccagctccagataacctgtccacacgtttccgggttccactgaaatatgattgaggcaaaagctttctctttttttcccggaaagaagaaagatcggggtggagccattatttgcgatctcttcttctgtccatacctgtttccacacctctgtgtcgcagcttacttctgtcagccctgcatttttcagggcttccacatcccactgaggacgcttctgtctgcttaaaggaacctgtctggcaatggcctccatccgttcaatatctgttcctgtataataatcttccagatttttttcttccaccctctggcggtccttctcgtaaccgctgcgcttttcctcatcataaagatgaccgtaccagtctgcatcaaaattgcacagaagtccgcccggtttcagcacacgtacccattcctcatacgcctgtcccgggttttccagattccaggtaacatttctggaaaataccgcgtcaaattcgcagtctcccagttcaagcttctgggcgtcactgagcttccaggtgattttttccgcaaacactcctgtattcttttttgcctctttcagcatctcctctgtaacgtctgctgccgttacctgatatccggcctccgcaagaagcagggcaaaaaatcccggtccggttcccacatcaagaaccttcagctcctccgggttctttcccggaaaattctcttcaaggagagaaagaagcttgttcttccacatactccgtctggcgtctgccatttcctgctgattatattctgaatagccctctgcacgctgtgtccagtaggcatgaatttcttcctttaacgtattcatgattctttctgctctttctgttagtatgttctttctataaaaagaatcctgtattttttcggttcctgcctgtggctgccggttaattttcatttcctgctgcctgtggcaataaaatttttataatggactttttatagacggctttattatataaaaaaagaaatccctcctgcaaccctcccggggggatttctttgctgttcaaaacctgtttcttttctggatttctccgctgataaattcatacagcttctccaccgcgtctccgtgaatctgctttttctgagcgctgaccatctgagctaccgcctcaggatcgttcataagctggattcctttttccacctgcccattgagggtaattgctgaccagctcatgcctgccttcataaaaaatttccggtttactgtttcgcagccgggaatcggagccgtatggatcatcggcacacccgtcactgccgcttctgtagatgtcaaaccgcccggctttgtaaaaagaacgtcacaggccttcagataaagagacatctgggtggtaaatcccagaatctgtacccggggctgtttacaaaactcttttttcaacttctgttccgccttgcggttgcttccgcagatcacaagaattttttcctgagctgtgccttccaaaagcttttttacaagctcggaaagatctccggcccccatacttcctccggctgccagaaaatatctgcctttcgtatcaagccccagcttctcccttgcctgttctctgcttgtattcctccggcagctcttagccaccggaatcccaaaagccaaaagcttctccgcaggaatcccccgtctgacacaggacttttttaaagcctcatggggaagcacataataatcacagtctgtctcctcccagaagggaatacaggtgtaatctgtcattactgccaccgtaagcggaagcttcatgccctttcgtttcatataagtaattgtttctgccggataaagatgcggcatgatcagaacatcaaccggatgttcacgtaaatatccgtccagatactttgccattctcccgttaatataatacacaggagatttcttcagcaaccggctggctaccattcccagcttataaaaaagcccgaaaagtctgggcgtttttttgacgatctgaacatatccgtctcctaccagacgtgaaactccctctcctgcaaggcagagatagtcaagtacatatgcctcgtcgcctctctcctgcatctcctctgcaatcgcccgggctgcagaattatgtccgcctcctgtattgcaggacaaaatcaatgctttcattcaagtctccattcctctccccgcctgtatgcggcatttgccttcagacaatgtttatgtatcacaatccccgacatcaggacacagccggccaagactgttctgcgcggcactgtcagcataacagtaacagcaaaggccagaaacgtatatacgctttttctggtattagacctggcagatattacgatcacaaacagcagataccagaaaatcagagctgccagaggctgccacagaggaagcagtccgatcagtacgccaaaagatactgcaatagccttgcccccatgtcctttctgaaacagagaatgagcatgtccgaatacaggcgcggccattaccagcgcaaacatccaggaatccattcccagatccctggcgcacagggcaaccggaagcgccccctttcccagatctgccagaagaaccagtatcccacaaaaagcgcctccacaagcaaatgcattaaacgttcccggatttccatcctcagactctgtctgaacatccactccccgaaagatcataggaatcagccgtccaaacaaaatacttcctgacaaaaatcccataatcacatagaaaaagtatccatatttcataatccaacctgctttcctgctgcaaataaaatctcacagtcgtttctaaccagagctgggcttctcctccgacctctgaatttctcatttcccttaattacagttctctatcaatcccctgtccagagttttcctgttacaataccatactccacagacagattgtgggaagcgataacaaagtagaaaaaataaccatttttgttgcaaagggagaatccaccccatatttctctgccagaatacttgtggtagcgcctgccggcatggcagccagcagtacacagatgccaaaagcatttttatcaagaggcagaaagctacagactccgtacaccactgccggaatcaccacaagcctgtgaaacgtaaactttgccacagtccggtcccagaaatcctttacattgatatctgcaagaatcattccaactgccatcatggaaaaagctgtattgcagtttcctatataatccactgcatctgtaaccggcgccggaagcttccacccggtaaacataagaagaatacccagttcactcataataatacagggatgcgtcagaaccttcctgaccgtttctttccggtctgtggttccggaaaaaactgccagtccggaagtccacatcatgatcctctgaggaatcagataaatactggcaagcaccagcccctctgccccgtaaatcccctctgctaccggatttcccagaaaccctgcgtttgaacagatcgttccataccggagacatttatttttcccctctggttccttcctgaagatcagccttccataaaacacgcaaaaaatctgaatcccgacagagatcagaaggacctccagataatacaagagtctgccctccacaggactgttcataaatgcatgaagaatgttgcagggcagaatcacataaataacaagatcgttcaggtttttttgtccctgcggtccaatgagcccgatgcgcttcagcataaatcccactgctaccagaagaaaaatcgttgcctgcagcgtaagtactttttccataatacccctcttttcctgtctgtacagaaaatctcctgtcataatcatactgaccgctgatttttctgaaagatatccccagtgtatcacaaccaaaaaatactcgcaacaaaaagacaaacctctcttgacggcacagcttataccatgctacaatgtcacctgtccaaaacacagtgtggacttttttggccaggccacttttcgccacacaattaccatccggtagttgtgcggcttatttttttgccataaaagtcttttttataaaccaacaggaggaatataaatgaacaatacttttatgaaagaaaagccagtatttcctctgatcatgtccatggctctccccatggtgatctccatgctggtaaactctttgtataatatagtagacagcttctttgttgcgcagatcagtgaagatgccatgacagcgctttccctggtctttcccatccagaacctggtgaatgccattgccattggttttggcgtgggaatcagctcgcagattgcttttcatctgggagccggaaataaacacaatgcagatattgccgctactcacggaacggttttgtccgctgtacacggacttattatgatggtagtctgtactctgatcatgccctcctttcttgggctttttacaccggacaaaaaggttattgatctgggcgtaagatattccggcattgtttttgccttttctgttgtgataggccttgaccttgcctttgagaagatttttcaggcagttggaagaatgaaagttaccatgttttcactgatgtgcggctgcattaccaatattatactggacccggttctgattttcggtcttggtcccttccctgcccttggaatcgaaggcgctgccctggcaacaggtcttggacaggttttaaatctgatcatttacctggtgatctattttgcccgcccgattcctgtacgcatcaggaaaacatgtctgaagccagacggcagcatggacaaaaagctttacgccgtgggagttccggcaattctgaatattgcgctcccctcccttctgatctccgtactgaacagcctgcttgctgtttactcccagagctatgtggtaattctgggcatttattacaagcttcagaccttcctttatcttcctgccagcggaatcgtccagggtatgcgccctgtaatcggatataactatggagcaggagaacacaaacgtgtgaaaaaaatctatatggtaacgcttgccatgagcagcgtcattatgatcatcggaaccgttatctgcctggcagttcccggacagttgatgggactgtttacctccaatgccgaaactgtccttgcaggaaaaacagctctccgtatcatcagcgccggcttcctggtttccgctgtatctgttaccgcctgcggcgcactggagggtctgggaaagggaaccccttccctgatcatctctctgtgcagatatgtactgatcatcattcctgctgccttcgtcctcagcaaagtttttggagctgttggagtatggcatgccttctggatcgccgaagcagctactgcagtcgtagccggtctgatcagccgtaaagtagtatggggacgttaaacgtccccattagatttagtattctaattccccccagtattcttcatagtatcttttcagtattttctgatattttttttttcagaaagtgcatcataaaactttttattttttataagatatgacatccatcccagccattcattatcttttagcagaagcgcctgctttacctgataaccaacagcatgcaccaaaaactgaggctccattttttccagcctctccatgatcaaaaatgccccaggccagttgatatcctgcagccactccagcatctcacatgtgtatttatttaattcttcatcagttttttcacatattacttttgcgcaattttcccatgaccatccatattctataggctgcataaatacagataaggattttatctttctcgcctctctgagagcctcttcctgaacctctacaggttgtccctcatccatcatttcaaataaagtatcaatatctactgacatatcaatatcctccgtcccattttattgctacacttttactgcctgaatccatatagatcaaggtaaaataaatctcctttttctccccaatattcgatatccacccccaatttttgaagttcttgtacttctttgtcattatctgtatacaaataagcttctttttcatgtgctgtgagtgcaaaccagcaataaccttttctgtaaaaacataaatctacaggcgctctgggatagctccattcaaatatatcatttactcttgtcagaatatcgtaacatttcatatccgcacaataaaccattaatctatatacagcctctcctcccatggtttttgtatgcggccattctgatacattttcagcgtatagtaaaaatggctccaggctttttttatattctttaaaatctttatagaacaacatgttagttccctgtctataataaactactgagaaaaaatcactgttcaaaagcatatatcttataaaactattataaatctctttatttttcattttatcaacaaaatataccttcacccaatatcctcccgtatagtataccttctctattccgttatgaaaaataagttggcggatatttccaccgttcgacagatttccccgtatctaatcttttttcctgttatacagtatatattctgttctccagtaaattgaacttccagttctccactttcccatgtcttaatttgtcaccaatatactgttctgccttatattgacacaaatatcctgctgtatcatactcgggtatgtataatgtccgctcaagtacaccatcttgtccgattttcttgtccttataaaacactttaataatatttctcctaactatattactttgataattattcccccttcgccttgacaactaagaatctgatattatttgcaatcaaaataatcagtattctaatttcccccagtattttttatggtatcttttcagtattttctgatattttttttcttcagaaagtgcatcatagaactttttattttttagaagatatgacatccatcccagccattcattatcttttagcaaaagcgcctgctttactgcataaatagcagcgttcaacaacaactgaggatccattttttccagcctttccataatcaaaaatgctcccggccaattaagatcccgcagccactccagcatctcatatttataactatttaattcttcatcagttttttcacagattacctttgcacaatttttccacgacaatttatattctatcggctgcataaatacagataaggattttatctttctcgcttctctgatagcctcttcctgaacctctataggttttctctcatccaacatttcatataaagtatcaatatctattgtcatatcaatatcctccattccgccgcctttcagtgagcggtacaaataagtgacactacaagtctgtacactaaaaattgtttcagcagcttagtttttaattgtgtggcagttcagtcaatgacttcttatcaatgcaattcgctgaaaaatactggattcctgtttttagtcttcttgaagccgaaattaatgctaccattgtcaatccaaaatgggaaaaatcagtaaaaggcaatgaagatcttttggaagtcatccacagctaccaaggaagcggcagcgtatactgcctccttagtataaattttaataaaactctcggtctcccatatggttaataattgatctccatcttaatttttcagcacaaattactgttcccatataatcatctaaatctgcttctgataatcctccacagtcacaccaataaatcaattcgttttgcataaacatagtagcatcaagtatttcacatgtatacgtttcatctaacggtaataattttaaatattttaaaccttgaaattccaattcaaacataccattttcttcactttggcattgaaatgctacatttaatatcctcttatcatttaccggatacatttcatatctattatttacatatgccccacttgaatatttcaattctttaatacaacagtcatggaaaaaatttatttttttcataaaatcatttatctctctctcagaagaaatctcgtaccacatgcaatccccctaaatatgaattgttccatctataatgtagacatcaaatatttacaaactccataaccccatacaaagctgtttattatagaataatccctctgatcttcagtcaaaataatttggagggtatttccatcttaaggaatcctttcccgtatccaatctttctttttccgacaaataaaactcattataaccggatatatgtgcaagtttttcccggaatacctccttcgctaatctgcttccaatatatgaatcaactttatatccggatatatatccttccttatcatatattccggtataaagctctcttattatggttccatctaaagttgtattttcattatatatcggaaaccaaaattcttcataccaccatttttctattttgctgttatcatacaaataaatttccttacctactctgtatattcctgttgagccttcatatacacaccatttcaaatattccaatttgttattaatattttttaggatctttattccaaacaatgtttgttttccaacaaaccaattataaatcatataatatatatatccattgaaatataaaacatagcaaatgtgatgatcattttcacttgtataataaatagtggatactaatctgccatcctctcggaataaatattccagctttccatatttgtcttttggtactctcttataaaaactccctcttttcgcatttcccactgtaagatcaaataccgggcttacttcgtataatcccatactatacccttcatatttactgtatttcctgtaccgtacatttgaacttaaaatagccgataactcttctccccggcttttacagatcccctgcataatcagaaattgaacagtttcttccatgtgttcatctatgaacgttttttcatcaagcaaatactcttctgcttttttattccggtcagaaaatttctgtcggattgaatcttctctttttgtaagatcggatctcttcgtattcagcacatctaaaatcgcagttctattttgcttacattcttccgggctcagtttgcagccatccagcatttctataatctcaggacactcaagaaaagcgttcaggcaattataggattcctgactgattttgccctgttgataaaattcactaacaagctcctgccaaaactccttttcacttatgttcttcattcaatccccccttccccaataccattctccctggctctgtaccacctgttctttttaaaacaatatgaaaataagacaaaaagcttctgctggatgaaacaacactgatctgattacaaagaagcaatactccatccaaaataccgctgctgctaaaagcttatcccaactatgctaaatacagcttaccactatatttacagccccgtcaataaaagtaaccatgttattctaatacctttatatccttttttataaagaaaacggctgaattttcaaccgttttctctcacatcataaatatctgaatctccagtccttatcatcttccaaccccagaatcacatttaccggaacttccagaactctggataatctcattaaaaattccacgtccatttttgttatcccgttctcaatccgtgaaatcgtcatcgttgacacgtccatagcttctgcaagagattcctgacaaaaatcacagcgcttccgcaattttcggatcctttctcccatttcaattctctgctgattaaattccttctgcatcaactgttacccccttcagatttttcttctgtaaaataaaatataaatcacatcctccttcctgatacgcaaacacttgtttgtatatattttataggaaacatacgtttgtgtcaacccaataaaacggactgaactatatttatttataaaatttttgttctgatatttcttttcctacttttcccgattaccttctatgcctctgtcagattttataacttggtatatcccccatactacctcgctccactttctgctgtgtcctttaagatatctactgccttttttatcatggaaggcataggaactcccatcatccctgcattctccacaatagaaagtacttcatttgcaataaatccgatgcacactgcatttcttatgtattccactcccagaaccatatccagacgggctgcgatcaggacatacaataaagtcattcctttcctgcaaatacctttccatccggctctgctctccaacgctccgttaggcgacttcagacttttgcggaacacagccggaagtatgattccgcctgtaagccagtccaaaaccatgaagatcaataatgtctttaacgcggtatcccagcctccaaacagttctgctaccgtactgcctaaaatggcaagtactgtaaaaatcttatatttcatgctcgttttcctcctcatataatcaagtgttttctattgaaaattcaaggtttttcaacctttcatatctcagtgaataagccacagctatgagcatttcgatgtatcaggtactgaaatagtggttagagggtatacgaaataaaacgtcattgatttccgttttactggccttgtatatacccatccctctatggcagctaacctcctatatccaccaggatcatctctgtctccagaggtcctaacttccttcgtcctgcctgcccataaccagggtgtcagctatgctccattacagggtcatgccctatggaaaatattcctgccgactactggctcattctttgtattattgattactgactcgcttcctgttccagcactgtgatcagtggacgttatctgttacattctgcttaattcagtggctgtccacgtgacagcctccattatagttacttgtctttcttatgcagcctgtagataaactgccggtctcttgatgtcactgaccatttttttcggatcataatccacacctttagtcagcatcgcaaaaaagactcgtatcagcttggctgcaatcgccataagtgactgcattttcttcaatggattcagccttctggttgtgtaataattatgtagttccctgaactccgggttcttcgctacaagcgacattgcaacctcaaagagcaggtatctgagtctctttcgacctcgtctgcttattgttgtctctcccttgtgctttccggaactgttctcaaccaatgccaatcctgcaagcttctgcagttctttcggactgttgaagcgactgatatcacctacttctgcaaggaatccggacactgtcttgattcccacacctttgatttccagcagcttttcagccatcggaatctgttttaccagttcttcaattagaaccataacttcctgtagacgcatatttctggattcatagtcctcaagaagcatccggatctccattcttgcagatactgctccttctttgcttccgacgctgtgctccgcagcttcgatcagggtcttcgccctcgcctttccaactgctctcatctttgcatcccgccagatctggtccactccatcgatacccaacgtcaggatatcttccgggagtggtgcctccttaaggatcagcattccgctcttggcatccggctttccgtataccgtcttatattcaggaaaatatatattgaaccaacgactgatcctgttttggattcttgtaagttccgactgtaactggaatcttatgtttgatgctgttctgagatcagcataaacaccatccggcagatatgggatcatgtatcgtccctctctaaccagacctgcaatcactttcggatccttacgatcattcttagttggattattgtcgtcgagttcttttgatttcttgacatgatgtggattcacaagtactggtttcatttcattatcctgaagatactttccaagattaaaccagtagtgccctgtcggttccatgcctggaaccaccttatccttctcatgtttttctttgaggtccaggatccattccttaaatgtcacaaatccggcctctgtgttactaaacttaaatggtttctttgaatactcaatgcctctgtagtcaaacgcccttgcataatgtgtttcacttcctacatcgattccgattaccaaagttttttcagttattgcttctatttttttattctgtgtgttagacttcattgtagatacctctctgttcaataagatttttactaacctgccagtcagtagtcttattgtactctgaggtattttcaattttcaacatccacattttttattatacaggaagctccatttctcattaaatccccttaaaaaagggtataaaaaaggaagcggcaggggaaaccgcctccttaattgattttataaaaattactgtaattttacataataccataatggatcgagttgcttaatctctatttgttcataatataaattatttcttattatcttttttaattggttctcttcctgacaactatatatatacattgtagatccgctactaacaatccctctggtttcccaaaatccaaaaacgctatcactcaaaggactttccaagtataaaatatcaccgccactggaaattattttatacttctcgggcaaatcaattaacttagaactcacttcttttttaatttctccttctaaaatcattttcactacttcttctcgtttttccttgtatacttgatactttaaatcatcaattcctccatttaaccaccaaataaaataccctaaagccacaagtaaaataaacttttgcaaaatattgtactgttttacaaacattcttctaaaaagcataaatattaatcccaaactcataatcaagcaaatcagaaacagcagtaaacctaatataaagaacttttgtacaatataatctgaatgccacatataaataaagtgtcctactataaaccaaaaactgaacctaataaatttattatttttcatatatataccccgtctttctgcgaaaggcacctatggggagaataaacccctttgtccgactctcacttcctaatctacttccaatagccatactaaatacaagctaactcatttcttttcctttacaaaaggattgcaggaactgtctgacagtcttacaaaatttcgctgtactgacgtttgcatggactctaccggcaagtactggatttctgttttaaatatcttagagaatgataatctttcgattactctttctcaaacaatatactgttagtgatttcatgagctgtcaccagattgctcacatcagttgacgctcacttgcttaactttctgtcaccagtcagttaggcaataccgcctgtttccaggcggtacctgctttatgaagttaccatcccaagcatctcgtgttccacaacgaatttgatcatataatcatcgatcaatcgtttctgattttgaaacgcatacatcagagctttttcacagacacggttgatcatccgtgggattcctgcagatgccttatggatctcatccaatgccttggttgtaaatatttcctgcccgcatccggagtaatccatgtggcttgcgatatattgttctgtttcagaacggtcaagatgaggcagcgtacagtacatgtcaatgcgctgccggatggcggcataccgctgtagctttagtttattttcccacagttctgtctgcccaactaaaacaagagccatgggactcatggaatcaaaccggtaattgagcaaaaagcggaattcttccagcgtctccttctctaacaggtgggcttcatccaggatgcagacaacctttttacgctgtacgccccggattacctcgatctcctgttgcagctggcgctttgaatcaccgcggtagaaacgggattccagccccaactgatccagcagacctttatagaaccaccttggggtcagttttgagtctgacagataaaggatgatgtaatcctcttttggaagttccgaataaaaccggcggataagcgttgactttccacaccctgaatcagctgttacaacagcaaacatctggcggtccgccacataagccagacggccgagagtttcccggaaagcattggattcgaacagtttttcaggagggacatcccggacaaacggtgtatgttccatgccaaagaatgattcatacattgtaagcgcttaatttttaggtatgatagaaaaatccccgactacttttcagtagtcggagcaccttgacaattcacatatgattgatttgatccgtttgcacgacgttcgatttcagctttgacggtttccttccatggagccagaagttctaattcatcatcactcattctatcatcaggtagtttttccagcagataagtaagatagtgatagacgtttacgccattggcttttgccatctctaccattgtgtacacgatagcgctggcctgggctccgtttggtgtgtcacagaacagccagtttttacggcctactgtaaacggacggatcgcattttcactgagattattagaaaaactgcagcgcccgtcttcgagataggtagtcagataggagcggcggttctgaatgtaggtgacagctttatccattctgcttccacgggtagggttctgctgatcaagccacgacaaaaagccttctactaccggcttttctttttcaaggcgagccttttttatagcatcgaaggaagaatactttgatctgatcacatcttccagatggaagagctggttaatgtacagcattccctgtacagatggctgggtataatccagtgcttttcccttagggatggcatctgtcagatatcttctgatgtgtgcccagcaggctgtgcgtttggcatccggtactttattgtatccgctatagccatcacacatcagataacccttgaagccgtgaagaaaatctacggcattgtccccggcccgggtctccgagtatttatagaggataataggtggtcctccgtcttcaccgctgcggaacagccacatatatgacttggtttgcgcgcggcgttccggttcatgcagaacctgaagtggcgtttcatctgccatcgcgaatccacgttccagaagtttcctgtggaagtattcgtacataggaagaaaaaatgcttcagaattccggatcacccagtttgccatagtagctctggtgatctccacgccatactgtttccagtccttttcctgacggtagtatggaagaccattacaaaacttctggtacattacccaggcaaccgttccggcagaagccattccataaagcatatgggatctgccatcttttccttttttgataaccggtatatcctgaagcctgcactgcgggcactcatagctcttactgtagtattcatatactttcagttttgccggtacaaaaaccagctcccggcggacaaactcttccccgatttctttcagtggggtaccacaggcagggcagagtttctcttcctcagaaagttccagatactttttctcaacaggaactcccttaaaccgttcagcatctgtagctcttgcttttcgtttttttgctgttttttccggaagaagtgcctcaagatcctctgcttttacagcttctggatcctgttccagttccgcttcattgaaaaagtttaactggcctggaatatcgatggttcttttttcactggaggtgccaaacagttttttacggagaaggtctatctcttctttcaggttatcccgttcctgggtaagagcctcttcccgtttattggcagcatcgacagttgcctgaagtgtttttatcatctttttgagatcgtttatcatgtccttcagctcacggagctggatatctttggaactgtctgccactgctttttcctcctgtttctgatgtttccattataccagaaaacagtggcttttcccagcaaaacagcggatttaccagaccttgaaagtgccgaaaatacagcaaaaaacaagagttttatgtgcatcttttttacgttgccttgatcgcttttggctgctcaatatcaatgccagacatcagccagtcgaactcccgccatgtaagattccggacctcagatttattcctgggccaccggtaagatccctgggcggtcagtcttttgtagatcataacgatcccgtcaggttcttttaaaatagctttgatacggtcgcatttacgaccgcagaaaagaaaaagtgcatggtcgatctccatcgaaaactgttcctggatgatcgcacataatccatcaatggacttgcgcatatctgttctgccacagacgatatagatcgcatcaacacttgagatgtccgctaacataatgactccttcagcgtatccataagcatcttcagaagtaccggtttgatctcattactcattcgtataagcaatccgtctgcttcgatttcaatcgtatgtgaattgtcaaggtgcataggactgtttccattatctggaatcagtcctgccggagaatactccggttctatagcaatctggactacatcctgtttatgggacgtaaggtcaagagtgctggcttttccaactggatccggtatctgacaggcttttttgcggagacgggtaactgcattgtaaaaacagctgggagatatcccatgttcattacaccatgcagcatctgtcaggccactttgtctgcattcggtgaccagttccatccattcgtccagggaacgtcctggagcacgtttattactcataatgaaacctccaaatatagtaaatttctatctcctatcaagcggagtgtagtaaaaatctatttgctatcattatgagttcaaaaacgtagacagtaaagctacccaagatttaagcgcttaccatacattagtcattcgcctccttcctgtaagatgcaaatgaaatcgcatctgccatctggtacttactctgtgtatatttcgtttccagcgcatccagaaaacgggaagttgtcggcacttgtccctgcatggcagccggaagtgctgtctgcctgtcgcaatacggtccaatctttacaggacttgcctgaaaaggttcaaatccgggataggaaacggtgatgatctcaggatttgccggatcataggagatttccaccgtatatccgatcagggcaggtttggtttcatacctttgcccacggaaactgatacaggcacctttatccacttttcgctgctcatggtgcaggaaagcttcggctacaacggctgtatccaaaaaagtcagtggacggctgtcccggttccattcctgcagtggtgatatcccttcttccggaatggcagcaccgaggctttcatagtattctgcaatgccatcatgctttttcttgtggtaatactcatccaggcagattgcccacaaacggttcagttcctccagtgttttgatatttttcagctttgcttcccggataaaagcatctaccacctgatggaacttttcgattttccctttacttttgccggatcttggttttgcatacatcacacggatgcccagccttgcaagggaagaacggatctgttttgcgatatactgtgttccattatcaaagtaacaggaatcgaagattccataccgggaaatcgcttggtgaaacgtatcttcaatgattgattctccctgattgtcataaaaccgggatgataggagatacctggaatggtcatcgattgctgaggacaggtaagtctgtaccttagccccatttcttccgattggaagcttgggtccatacttgatgtccgcctggatcagcatcatacggtgcggtttgcaaaagcgtttggaagaactgtttcttgcatcctgatacatttgcatctgcttttgtccgtaaccagccttatagatatggcgttccaaagtagaacgctttaaagtaccgggtaccgcaagcccttccgtttccagaatgtagatgatctgggcaaccgaccgctccggaacctccttgcgaagttggattgcctgttccaacaggaacgaaaagttttccggaagtttttgtgaccggtgtttctcacggtcagcaggttttagccctgtaaactgcctttccgaaaaagctttttcatagcggtaaagggaacggacagatatgttgttttcctctgcaatctttttgcgaagctggatacgctttgcatcatccagaccagtctggagaagcggtgaaatcaattgaaaacgcctgagggcttcttcctcttgccattgttgtctgtttattgttgtattcataagataatgacctccttttgagaccaatataccctttggtactttgacagacgatgcaaagtaggtgcataagccttaccagcggatcgggactaaaaatcctccgctgttgtaaatctggcgtaagatgatttccaaccagttttgatattgattcctgaaaaaatcgagcagtgaaccaggggaaatcctctcttcattataacccagcaggaactcccggatcgtccttaaatatccgttgatacgttcaagattttcgcagaaccattgcagccagcggagcatggtagcgcaggacgggtagtcttcagaatctaagtcttccggctgtacaacgccatccagcaccccggagatcacttctgtttcgtaatgcttgtacggaacaagacaatccggaagttcattatgataagagtggcagttcttacaataaaaccgccggatgatcaactgatcttttaaaccgccttcctttctacggatgcgtgggcgtgaatcccggtaacgaagcgtagcctgacagatggggcacatatgggtggtcacactgctctcaacaaaaaacaccaaaatcctccttgaggacaagtgaataatctgatataataaccatggtttagtgaccagggtctcagagtacacaacttgccaggagggtgctctgagaccttttcctttttgtatgctgatgacagtatacaggtcaattcagagacaggcaagtaaatcagtattttgataatttatgaggtcaacaacaatatacacgaagccccaacaaaaaaataaatctgaccgttacaagtgtataaaagcacaccatggtcgtaagaaaaccatccttataatctgccgtatactcctgaactgctatctggcacataccctcagctgtataaaccatatacaactgagggttttcttaaatcacatcctgaaaatgaatcaaaaatatcgactacttcacagactcttaattcactatagtaacgtgggtataccatcgaagataatattatccccaatttctgattaggtattgtgtctatatttactttttgaatccacccacatgatggtttactatacaggtttctttttactaatcactatttctttgtttcaaacttttccctcttaatctaccttcatagaagcttcgatgcaggtaagctactatttcttattaaaaccaatctctattatctctatcccacaaaacagttccatatcaaaccattaactggtcttgcggatcatcaaacgctgcataaaaatgattccattgaatatccggaaaatctgtcttaatctgatataatccgccacctaacactaaggttattgctccaaacaattcacgccccacataaccataatgaatgttacctatatcatcctgacgcaccgaatctccattataaatataagtactattttattacatacagactatttgatcataaataaacacataacgaactcccttttctctttttggcttagttccaagaatttcatgagtaccccgttgagcagtcggggaatttttccccgatgcccaataactatcatactgtctaaaagttcaagcaaggaagcggcaggggaaccgcctcctgattactatttatcgcctgttttctgacaattcgctccaatctacttctatctcataatcatcaatataaagtttataatctgaaggtacttcttttaaataagaatagtatatgctaacatttaagcctttgcccagttttgatccaaaataaataaaattactattctctgaatctttaacatttctctttttccatccattctctgtcgaatcccacaggaaaatataacaactatctgtatttccatcccatgtaatacccgctctataatcagcagtatttttgtccattgctgaatttcctgctgcatttccgtttccacctagtaagaagtcttggggaagtttccacttatcttttcttttctcataaatgttcacgtatattattccctcatcagattcaggcacaaacgctgtctcttctccaataagcggatgtccttgttgattcgtgtttccataaaatgagattgctttttccagagaagtaaaagatattgtattacggactatatttgtaagaaaatatgatgccaacataataatagaaatatacaatatccattttcttacctttcctgttacagcctttttcttctttctgttaatcagccagacagcggcgcagcagaccacccagaaaaacattatatttccgattatcgtttcaaatcgctgaaagtccaattcccttatctccttttcttttatttctcaaatatcttttcacgtcagaataatcacattattatcttatagattccagaagaacaatcttttccagaccttttcactgattatcttttagtaacttttcccaacctacttctatctcataatcatcaatataaagtttataatttgacggcgtatcttttaaataactgtaataaaatttatttactacaccttctactggtttcgaactaaaatatgtaaatctgctattctctgaatctcttacattcctccttttgcaatcctggctccttgtctcccaaagtattatatatcggccatctgtgtttccctcccatattacactaaccatatatttgtttgtattttcatctataccattatgtattgaatcttcattaaaaagccaacagggaagtttccatttattttgttttttatgataaatgcttaattccaatccgtcattaagctgaggaacaagggcagtctctgttcctataagtggttgtccctgaggctctgtgtttccataaaatgaaactgctttttccagggaggcaaaagatatggtacacttgactaaattcgacataaaatatcctgcaaaaacaataatcgaaatatatatcatccctttttttagctttcctgctgtggcttccttcttttttctgtgaataaaccagataacaacacagcagatcacccagaaaagagctatcgtttccactatcatttcgaacttttgaaaattcaattcttttgtctcccaaataatgttattctatttataactcctctgaatcctcatatccccaataacttctatgattattacactccttcaatcccattaacttaaggaaatctgcccgcatttctatatattttttccgttttcgtttcataataccagagcattccagaactcttagggacggttttccagagtatatcttgccattatcagaaatcccctcaaatctgagtactgcagccaaacggtttcgccttttttgtggatttacagataaaactttccaaaatctctcttctagttcctggtttccctgttccacacagagtaaaaagctcaaagaaacattatccgttttatacttattctcaatacatcgcccccagaaatctgcaaaaatatcgttttgtctttccataatatcttctgagtaggtttgtatatatactacctgaaatatctgtaattcccctttttttacacgaagataactgtctgtatatccaccatatgttttaacagtatttgtatactgatatcccatcttctgtgtagtttccctcaaatttcctcttattttctccttaggaacgtaataattgcaatcaaaaggtcgataataaccaaatccatgaggctttgctatatatcggaacggcatccaggttccatgtgaatcctccatataactgaagtctttatagtattgtcttccataataattaaaaattattatccagataatattacagatccaaaacaatatccccatactgtggatcataagtttcgaataaaaaaacactggcatcctgaacactatatccgaagaaacaatagtaggtatcctaagcataacaacacgcgcactccaatctacaggacagaactgataagtaaaaacaataatccaaatacttgcccaaaaaacaataatagccacttgacaataaaatatcccttttagaaacgaccaatattccgatttttctgcatccttcctaaaatatcctctgacatataacggattataagagcttaattctcggtcagtatttattatatttttgtcaatttgtggctttaaatatgcacctgacaaaatgcatcctatacaataaaagtaatacttatcatcatatgcaaaccatgtcattgccaaatttaaatttataaaatatactacaaaccacacaaatatgtatgtaactggccttggctttttcatctctatcccccccttttaatattggcagatttaaagttacaatacgtttaccttttcttaaacattcattttcctatactgtcaaaataatttggaggatatttgtcttttggttctctcttataaaaccgccctctttccgaattctcctctgtaagattaaataccgggcttacttcgtataatcccatactataccctttatatttactatatttcctgtaccgtacatttgaacttaaaatagccgataactcttctccccggcttttacagatcccctgcataatcagaaattgaacagtttcttccatgtgttcatctatgaacattttttcatcaagcaaatactcttctgcttttttattccggtctgaaaatttctgtcggattgaatcttctctttttgtaagatcggatctcttcgtattcagcacatctaaaatcgcagttctatattgcttacattcttccgggctcagttcacagccgttcaacatttctataatttcaggacactcaagaacagcattaagacaactgtaagattcctgattaacttgatcctgtgtatagaactcactaataaactcctgccaaaacttattttcacttattttttccattcaatccccccttctccactactattctccctgactctgcaccgcctgttctttttaaaacaatataaaaataagacaaaaagcttctgctggagaacaacgccagtaaaattacaaaaaaggaatgcaccatccaaaataccgctgctactgctaaatattatcccaactataataaatacagcttaccactatatttacagccccgtcaataaaagtaaccatgttattctaatacctttatatccttttttataaagaaaacggctgaattttcaaccgttttctctcacatcataaatatctgaatctccagtccttatcatcttccaaccccagaatcacatttaccggaacttccagaactctggataatctcattaaaaattccacgtccatttttgtgatcccgttctcaatccgtgagatcgtcatcgttgacacgtccatagcttctgcaagagattcctgacaaaaatcacagcgtttccgcaattttcggatcctttctcccatttcaattctctgctgattaaattccttctgcatcaactgttacccccttcagatttttcttctgtaaagtaaaatataaaccatagcctcctttctgatatacaaacatttgtttgtatatattttataagaaacatatgtttgtgtcaacccaataaaacggactgaactatatttatttataaaatttttgttctgatatctctttttctgcttttcccgattaccttctatgtctctgtcagattttatagcttcggtatatcccccatactaccttgctccactttctgctgtgtcctttaatatatctactgccttttttatcatggaaggcataggaactcccatcagccctgcattctccacaatagaaagtacttcatttgctataaatccgatgcacactgcatttcttatgtattccacttccagaaccatatccagacgggctgctatcagtacatacaacaaaatcattccctttctgcaaagacccttccatccggctctgctctccaacgctccgttaggcgactttggacttttgcggaacacagccggaagtatgattccgcctgtaagccagtccaaaaccatgaagatcaataatgtctttaacgcggtatcccagcctccaaacagttctgctaccgtactgcctagaagggcaagtacggtaaaaatcttatatttcatgctcgttttcctcctccatttctcattaaattcccttaaaaaaggtatagaaaaggaagcggcaggggaaccgcctccttggaaattgatattcactttacaattttttagcatttcttttctttctatatgtatgtgcccagccacaaggcaacatgattctgtctttctggggatctgtttgtgacagaatctcaaaaatattttctttcattctttcatattccttatatccaaatcccttctgcattccgggaatatacattttttcttcctttaaaaccaccccaacaggaaggacaaagaaactgttgcgctgatgaatctcgccacaaaatatctcttcaaaaacttgcgatttttcttctacataaataaaatatgttacacaaggaaatcctaatggcaaagttcttttggaagcatagtgaacttttttacggacaagctggttcatcatttcaatgtgctctttttttaaacggcgctggtacatttgaacaagtatttgtacattattattttcacggtcttctgctgcatccagttttatgttattccccatattcccgcctgttcctagcagcaaatattccgtaccatgaaatctttcctgaaaagccacctcagtttcaccaaatattttaaaatattccgagaatcttttataaaaaaatattccataattatcatttcggaggcattttctgcacattgctttttctttaaaaaatgcaccttggttcttttttctctcagcgttaataattccgttatagtatatataaaatgccaaccacaaaatcctgctaatcactagcgaagaaaaaatcataagatcaggccatataacagaataataccttcccacattttccaatttggtaaaaataacaataatatatatactccttattatcattacaggcatttgaatcattgcaataatctggcaaaaataataacctttcagctttgccattttgctgttaggattccttttataattcttccgaaaacatccttttacatacaaaggatttgacgaatcctcccgcagggcgacccatgatgctttatacctatcacgtccaaactcattggcctgtgacatacgaaattcatatccccaattaccaaccaataccacaggtaaaaaaacaacatccaaaaaaagtcccagatgtcctccccaacttccccgcattacataaaatacaagtaaaatcacaagcatcaaaagaaatataatatattcctttaaagtatcaacaacatccctaataaccattttataatgcttcactgtttttctgcgctttactacagacttcattcactttcccccataaatatgagatattccctctatatagatatcaaatatttacaaactccataccccatacaaagctgtttatatagaataattcctctgatcttcagtcaaaataatttggagggtatttccacctcatagcatttttccctgtatctgagcattttccccgctggatatgacatatattttggctacttatcattttcttttgatccaaatcctggcctaaagtatatccatatatacatccatttttatcatattctattgtaaacaaattctggcaaaattttccttcttctattcccaatcctttctccggaaaaagatatcgctcccacacccatttattcaaaaaattatctttataaatataatgttctctttcaatagaagcaatcattgaatctgatatacagtttactttttccaaatattccggtttatttttttcatattttataatgtacaaatacgataaaaagctgatatcttcttccaacatccctacaactgaatatttcaaataaaaaatatatctaccaaaatataatactgaacaaaaatatcggggcttttctttcaaatacaaaaatgcagaaatcagatttccgtcttctctgtacttaaatctaaacacatgatccatttttatgggctttcttttataaagctcgcctcttttcatattacctacaatcagatcaattacaggactcggcgtatgcactcccaaatctgtatttctatattgcccatatctatcatatttcacctgagtatcctgaatcctaaacaacgcaccaccaatatcctgacacattttctgtaaaatcaaatatacggcacactttttcataaactctgaaatatatttttcctgtttttcatcatattgttctacctgactatgtcctggtgagttgttgcctgctctgtattttctcttcttgtcacactgcttctgaacatccagcaactcaaagattttattttttcgtctgttacattcatcctcatctaagtcttttgtctgttgaattgctataatctcaggacactcaagaaaagcattcagacaattataggattcctgattaaattgaccctgtgtataaaattcactaacaagctcctgccaaaacttattttcattgattttcttcattcaatcccccccttctccactactattctccctgactctgcaccgcctgttctttttaaaacgatatgaaaataagacaaaaagcttctgctggatgaaacaacactgatctgattacaaagaagcaatactacatccaaaataccgctgctactaaaagcttatcccaactatgctaaatacagcttaccactatatttacagccccgtcaataaaagtaaccatgttattctaatacctttatatccttttttataaagaaaacggctgaattttcaaccgttttctctcacatcataaatatctgaatctccagtccttatcatcttccaaccccagaatcacatttaccggaacttccagaactctggataatctcattaaaaattccacgtccatttttgttatcccgttctcaatccgtgagatcgtcatcgttgacacgtccatagcttctgcaagagattcctgacaaaaatcacagcgtttccgcaattttcggatcctttctcccatttcaattctctgctgattaaattccttctgcatcaactgttacccccttcagatttttcttctgtaaagtaaaatataaaccatagcctccttcctgatatacaaacatttgtttgtatatattttataagaaacatatgtttgtgtcaacccaataaaacggactgaactatatttatttataaaatttttgttctgatatctctttttctgcttttcccgattaccttctatgcctctgtcagattttataacttggtatatcccccatactacctcgctccactttctgctgtgtcttttaatatatctactgccttttttatcatggaaggcataggaactcccatcatccctgcattctctacaatagaaagtacttcatttgcaataaatccgatgcacactgcatttcttatatattccacttccagaaccatatccagacgggctgctatcagtacatacaacaaaatcattccctttctgcaaagacccttccatccggctctgctctccaacgctccgttaggcgacttcggacttttgcggaacacagccggaagtatgattccgcctgtaagccagtccaaaaccataaagatcaatagtgtctttaatgcggtatcccaaccaccaaacagttccgctaccgtactgcctaaaagggcaattactgtaaaaatcttgtatttcatgcttgctttcctccatttctcattaaattctcttaaaaaagggtatagaaaaggaagcggcaggggaaccgcctccttaaaaactaatgttctgatattattatttacaatcaaactaatcagtagtctaattttccccaataagattcataatatcttttcagtattttttgacactttttattttcggaaaaagcatcatagagctttttattttttagaagatatgacatataagtcagccattcattatcctttaacagaatcgcctgctttacctgataaccaacagcatacactagcaactgagaatccattttttccaacctctccatgatcaaaaatgctcccggccaattaagatcccgcagccacttcaacatctcgcatatgtatgtatctaattctttatctgttttttcacagattacttttgcgcaattttcccatgaccatttatattctataggttgcataaatacagataaggattttatctttctcgcttctctaagggcagcttcctgaacctctgtcggttgctcctcatctagcattacaaataaagtatctatatctactgtcatatcaatgtcctccatcccattttacaactacgctttttactgcccgggtccaaatagaatttgaacccgtgtctatccaagtttgtaacggtactcccaccggaagtactgtcacatgagtaggcttatctctatatgcatatactactcctgttgcgttcaacttgtttatggttgtaactgctgctgcacgtccaggtcgtgggggaattgttgaaaacgaatgccctgtgtcccaatccttcttttggggagttaaattacctggggttgttccaccgtatctataaattggaaaatctttcctctgcttcttagaccgcagtatagcgtctgcgtctatcttgacttcttctttttctttcgaagcaaaaaaatcaattgaccctacgaaatctatagctttatgtgccacaaatcctgcaacaaatcccgcaactgctgatgccactttttagctactgttactacaaattttttaccgtaccagctaacaaagcacctattgaagccgcaaaacatccactgtaatccacaagattagccggattcgcagtatgcatacatatttttcccgtggcttccggtaatacttaaactcttactccagctgtcataagtatagtttacctctgtgtttccataaaagaactatcgtttcgaacctttggaaatccaattcttttgtctcctaaattctgaaccattccctctcccttttttttatttcctcgacctctttctcagcttttctttagactttaccattacaacatacataaatgaaaactcttcaaacctatcaaaaattggggatttcatcttcttatatttgtcataaacaaatctcttcttcatctacggtaaacttatctataacctcctcaaaaacatttctcattctttgataattttctgtttcctgattctccccgcttttagaaatgtatattttttgttcttttaatacaattccagctgtcaaaacacaaacagattcactctgactattctgctgagttatcatatctattaaaaatggtgatagcttatccacataaaaaatgttcgttatacatattggcactacaggaagtctatctatatgcttttttacaaatttttttaactcttctttcaatagttttatgtgcctctctgtaagctctgaaacacaaagctgtactaatatctgagttttgtagttttttctatcttcataaatatgtatagatattttattatgtatgtcatctaaaagtctctcttttgtttccactactaactcataataatccataaacgcccaactggctatttccattaaatctttatccctcaaaaaagtttttataatttctattttttctgaatgttttttagatgtctgaaatatttcaccatcaataaataacttataaagttgttttctacttcgatttaaaatattattatatttccagcttacaaaacaccgaaaaaccgctcctagtatcatccatgcatatataattacataacaaaatactaacaattttgatatatacatttgattaaaacagacccaatgcacagccgtaaccaaagataatataattaaagctaaaatttttattaaagcctgaacttgtaaaacgtaaaagccttttaaattcgacatccattttctttttctgtgttgtgctatatacccatactgaaataatggattagacttgtcttctctttctgcaatctgtgcattcataccagaaaatcctggtatgttactattacgagctggacgccaattaactgagataatcagaataatacttaaataattatatgacatcctcttactaatcatatttgttccaataaaaccagttatacataaaaatgcaccaatgatacttataattaggataaaagaaaacaaactatttgtatccatctcaaatactctttttttattatcttttcttttcatacaccctttcctcctattaaatgatctgcttccaaatacaattgtaaaatattttaaacataactcttttaagaagtcaggaaaatatgcaataatgtttttgcatcttctcctgactttattaatatattttgttatttatcaaacaatttagtgataaatatattgtgtattcccatctttataataaatatcgtaatatattttcctatgtccagaccctctataccacattccttttccaatatggcgccagccagttattgatgacactccataggataccccatatcctgcacctgtagatattactgtttgttcaacatctacaacattggttcttttaaactttgattttaattttcgacattccgaatatcctacatccagtctacccaattgtatatactctttagctgttttatcaagacgttcatgaaatatttttctgttcttatcaaaaccagtgccatctcctcctatttttgcaagaatcccgcttgcagctgcctgcattgctatttctgttccatcatctccattcaatactccgccgacaactgttgtagccacatttgttacaacctgccatccccatttagcagcacttgcgccaactgctgcagaaattccgtcaagagcagcctgagcaacaactttccagctcatttcttttttatcaacaagaagctgctttcctaatgaaattgccgctcctgcaagccctataatttcagtccacaaatgtccattactgtcacttcttgtcaatggattctgattacaataagtatacagattcctgttatgaagagtttctgtggatgctattaaggttgtcaccgcatcggaagagataaaccttctcaactccggatcataataccggttcttcaggtagtacatccctgtttctttatcgtagtaatatcctctgtaacggaacgggttctgctggcctacggtgtccttcaggcttccggtaatgcttagaatcttaccccagctgtcataagtatagtttaccaccgtgtttccatcctcgtcaataagagcaatgatatcgttctggaggtttcttacatagaagtagttctttcctccaatgataatggaaacaaggtttgcgttggaatcataagtgtaccagaaggtctgtccattggtgatctctgataccagaagttcccctgccattcggtattcggtggctgtaccatctacaactttctttgttctggagcctgtatgatcgtaaaaatactggatgttctttccattgtttaccccggcaagctttctgcccataatccagcggtaagtaatatttcctctggtcagcatgtttccgattgcatcataggtcattgctgtgccgttccagttcacaagctggtctttccagacagaagcataagatcctgtttctgttctttccgggaaagcaggaagctctcctgcggtatatgcatactccttcacctcagtcagatttcctcccagatcatactcgtagacaaatgtcttattctgggtctggctgtcttcacggatcagctggttcctctcgtcatagcagaaagtatctgtctttaccgcgccggagcctgagcgatcctggatccttgtgatatttccgtttttgtcatactgataggtaagctttctgtctcccacagtcagacctgacggcatggcatgttcctgatttccgtttgctgccggataagccacctttactgcaaaagcctttttggtgctgagagttacacctgctgcccttcccagcttatcgtaagtgctggtctttgtatagcctccgcgtacctttgtggtctgttccctgccgtctttatcataagtataaagagtcgtagtatgggaaacgcctgccttgtggatcagttttgtcatgtggtttgttgcatcgtaagtatactcataaaaagaacctttttcatctcttacacgcatcaggcggtcaaggaaatcataatccagatcataggttttacctgccatatggttcacaacccggcaaagatttccctctttatcataggtataagtattcagcttctgctctgttccgccggaagattctctgaaatagctttctgtcatccggtcctgactgtcgtaggtgtaccggatctcatttccatttgcataaacagtcctgctgagatttccgtttccactttcataaatatactgtaccacctgactgcctgcaatggatgcggctgttgtgtttccaaaagcgtcatattcaaatccatagcggaagccgttgtggtcaatggacgtcagtttgtcctttgtatagctataagtattttttaccacctgctttgttccgcctgcagttacttcctgagagacggaagtcatgcggtctgcagaatcatacttataactcagcctgttgccctgtccgtctgtcagagaattaagaagatctgacttcacattccagtcatacagggttctgttgccctctgcgtctgtgacagacgccacatggtttttgtctgtggtaaaagatcttgcgatccagatacctttatcctgagcatcaggctgtacggtaccgctttttgtgatgtttccgtttccgtcatagaccagacggttcaccacgcccatagcggaggttcctttcgtcacgttatgttttttatcatactcatacttaaatttatttccctttgggtccgtgatcccggtcaggtcactgttttcattatattcaaactttgtggcatttttctgggaatccacggcagagattacattgtttttgtcatcataggtgtagctctgtccgaattcttcccggtacagggaaagtccgtcaaaaaatgcaaggttggcatttctgcagtaagtataggaaaccttaatgctggtgtaatcctgttttgccacatacacgtcacccaggaactgccagtcaagaatatccgggctgaaatttgtataatgaatgtcattttttccgtctgcccctacaaaaactacttctacgccaaagcggcggtatttatcattatctgtttccggaagacaggttccccgaccccaggcattgaccatgtaagtgtctccttttttgcctgtgagatcaaggagttttgtaagacgcttatttacctgagtatcgcctatgaaacggtatatatatttatccagcccgcctactctttcgggaactatggataccgcacgtttatcaacttctgttgtcatattcagctggcagtaacgtgcattcagaaaacagaaatttcttccgcgctgtactgcataccatttctgatttcctgtcaggcaaattccacgcactgcaattttctgacctgcttttaatgtaataattgcttttcctgtcagcgatggagtatcaaatactttgtcttcctgcttcatggtgcagacaggagcatttacactgagacggatcacatgatctctttttatatagccaaaataacgttttttatcgatctgcatggctacatagtaccatttttgtcctcttgaatctgttgtaatggaacggattaccacactggttcctctgggtatcacttcttctacaatagctccactgtcagaagctgaagcccgcaaaattgctcctgtaaccgcaactgccccacaattatctccatcatttccgccaaggtacgcaaatgctctgcttgccggaaaatatccccgttttccttctgcattttccactctgtaccactggctgttttcgtttggaagggaaacagaagcataaagatgtgtccatttctgtacacttgcgactttttttccattcagagacggtctgtcataaatatacgaagttcctgctgccgttactgttacagcacggtttaccggtcttacattttcagatccgactgatgtcagaccatcttcataatatgccttcttttcaaaatccgtgcttcccagctggaagtccccgttgtcgatcagattacatctgcttacagttgttcccgtttccagctgagccatatcaccgtataacacgcctgcagcatgatataaataaagatatacacgtactgtaggatctttagaatcagagggcacagtaaaggtacggtaaagacgtacgaaaccgcctgttgtttctttcagaatttcactgtccagataaatccattttccatttttgtcaatatatctgatcctcagccttgcgcctccatcttctgcggcctgcttcatttctgtttttacatacatagaaaaggtatacgtcattcctgctttcagctttacatcctgagcccagcttacataccctttcagggaactactctccgcttttaaggatctggttcctactttgcagtgcttctgatccgtattgacagatgctgttcctgatgcgtctgttccgataatctttccccatgctgacttagctgcctgaatgatcggatccttcaaaagctgaactacattggtctgaagctttgtggcgttttccagacagttcacatgatttccgctggtattgaatcgtgcgcttgcagcatggccaaagccgtcatgaatgtgcagaaggtttccgctgttgttaaagcgatagatttcgcttctttttttattgtctgtgaattttgtgctgttatagccgtaagtcagggtcagactgtttcctttcacattcccgccgaactctgtgattcttcttacacgataagggctggaagtataatattcgtaattgacacggtatccgtcaacatccgtcagggaagtaagcatatggtttttatcatatgtataatttacagtttcattgtcaatatcaatgatttttaccagatctccattgttgtacccgaacagcttctttttaccggaaggtgaagtaatctcatgaagataggtaagcttgccctgactgtttttcagataagtaagaactgtctttctgcctgcgccgtctgtaacagagatgactcttccttcattccaggcaacaactagagtatttccatttttgtcctttacttttaccagatatccatttcggaacatcagctgattgttttccttatcgtggatcacaagctgttcgctggcatctgcatgaatagtcacataggattccgaaccaccttcctccagccatttggattttttggaatcatagtaaaaataatgaacggttccgtctccgtctgtgtgctgataatagtcagttcctgcaatttttacttttttcagagtctgatgataactgagggcaaatccgtatccatagcccaggttcacctgcctgttattggaattgtatacatgggcaaggctcatgggtacgcggcttccgccagttgccatggtatcatggatcaggatcaggtttccgttatagtcatttacatgaacatttcccgctcttcccacatcctggctgtgatagctccagtaagcctccagacctgaataattcacataggaaagctcgattctggggcgcatatcctgaaatccgttgtcgcagtcagaggacagaaattctgtatatccggaaatctctttgtcatttttaaacatcagtccgtagttgccgccgttctgataccagtcctttaccattctggtaatatccagggtaatgtatttctgctggtctcctttgtatctgcatatatcctccacagtatcggaataaagaggcttattgtaccagttaatggaatctgagttccacgcatgaagcaccttatgcactgccacagtacgttcttttccgtcctcagccagtgaaacaagcaccagtctggcattgatgaccatatctcctgttttgatctccggaagcgcaaatcttacaaagcttctctgtacctgatcgcctcccttgtttttcaaaataatacttttctggaagttgtcctcctcataaagagaatccacatgggcatcatagatctcagaagcttttttggaggtagttgttacagggtcaatgactaccggaaacaggcggttctcagatcccagccattccatatccggcaaaaatgtgattctgcacacatctgcttctgtttctgtaaggctcagacggattgcctctgatttttcgccgccggcgtctttcatgcagggcgcatgaacacagaacacttcctgttcctccctgtctaaaaaagaaaccacattgttgcgcagtacaggacgaagatttttcatctgataaagacagctgtaagtatcggaaaccgcttccggtttatgaagaatcaggtcttccttcactccttccccgtgaatccggcagcgaagctctgccccgtcaaaaatgtccttataagaaactacgcttttttcctgtttccgggcttctgcataagtacctccctccagcccccaggaaagaaagctgtcttttcggctcaggtacactgtggaagccggttctgcttttttgttcaggaaaatctccagatccccttttctgttcagaaatcccgggattttattttcctgcactgagctttccatatccattcccgaaaaaatttctttttcacggaatctctgtaaattctgcggcgtttctgtttcctgaagggtatcatccatttccttccagtttccgcctctgtcctggtagtgtacgggctccagataaatctctactgttctggaatgatcctggttttcaaatacttttctgtttgcagtacgctgatccgcaagctctgttcgtttcatgtgtttcatctgcttcataattttgttctcctttattcttttattatttatttattcttgtaattcaggtccggctctgttttacaatcaggattataacaaacaaacgttctttttctccataacacatctgtataccgaaagaacatttgtttgtattttattatcagaatatttcctgttgacaaatacccttgcagggtatatgataataatacaaataatacccataaggggtatgtttataaacagaatttatttttagccataaatgaatcaaaggaggaatttacagtgactgaaacaacatcctgctgctgcacaaaaaaaacagtacgtccggaggaagaccggaaaaagcttgtaaaccgtctgaaaagaattgaaggacaggttcgcggtattataggaatgctggaaaacgatgcctactgcaatgacattctggttcagtccgccgcagtaaacgctgcagtgaatgcttttaacaaagaacttcttgccgcccatattaaaacctgtgtggcaagggatatccgggaaggcaaagacgaaaccattgatgaacttgtggttactttacagaaacttatgaaataagactgtgtacggaacagacagtctgtacacagcagaaggaggaaatatggaacaatatcaggtaacaggaatgagctgtgcggcctgcagcgcccgggtagaaaaagctgtatcccacgttcccggggtaacctcctgctcggtcagtctgctcaccaattccatgggagtagagggaagcgcctcccctcaggatattataaaggctgttgaggaggccggttacggagcctccctaaaaggggctgacagtcagcagtcctctgcatcccaggctgcggaagctcttgcggatcacgaaactcccattctgaaaaaacgactgatcgcctctgtgggctttcttctggttctcatgtatttttccatgggacatatgatgtggggctggcctgtgcctcagtggtttgaacacaatcatgttgccatggggcttttacagctgcttcttgcagggatcgtcatggtcattaaccagaagttttttatcagcggattcaaaagtctctggcacagatcccccaatatggacacgcttgttgcccttggctccatggcgtcctttgtctggagcgtgtatgtgctttttgccatgacaggcgctcaggtcagcggggacatggctgctgtggaaaattacatgatggacttttattttgagtctgcggcaatgatccttactctgatcactgtgggaaaaatgctggaggcccgctccaagggaaaaacaacagacgcactgaaaagtcttatgaagcttgctccgaaaacagccgttgtaatccgtaacggacaggaaaccacaatccctgtagaacaggttcacaaaggagatatctttgttgtccgtccgggagaaaacattcctgtagacggagtagttcttgaagggacaagcgcagtaaacgaatcagctctcacaggtgaaagcattcctgtagacaaagcagccggggatatggtatctgcagccacggtcaaccagtcaggatttatccgctgtgaagcttcccgggtaggagaagatactactttatcccagattataaaaatggtcagcgacgctgcagccaccaaggctcctattgcaaaaatcgcagaccgggtttccgggatctttgtgcctgccgttatcaccattgctgtaattacaactattgtgtggcttcttacaggacagacctttggctatgctcttgcaaggggaatttctgttcttgttatcagctgcccctgcgcactgggacttgccactccggttgccattatggtaggaaacggcatgggcgccaaaaacgggattctttttaaaacagccgtatctcttgaagaaacaggaaaagtacagattgtggctcttgataaaacaggaaccattaccagcggtcagccggaagttactgatattcttcctgcagagggattttctgaagagcagcttctgactcttgccttttctctggaacagaaaagtgagcatcctctggcaaaggcagttctgaaaaaagctgaagaacggaagcttcacgcttatgagatttctgattttcaggctcttcccggaaacggactttccggcattatgaacagtcagacgcttatgggaggaagtatgaagtttatcagcagccgtgtttctgtgccggattctctgaaacagcaggccgaacatctggcggaacagggcaaaccccctcttctctttgcctcagacaacaaactggccggtatcatcgcagttgccgatgtgatcaaggaagacagtccgcaggctgttaaagagcttcagaatatgggaatccaggttgtaatgcttacgggagacaatgaaaagactgcccgggccatcggaaagcaggcaggagtggacgaggtgatcgcaggagttctccctgacggcaaggaaagtgtgatccgttctctgaaggaacagggaaaggttgccatggtaggagacgggatcaatgacgctccggctcttacaagggcagatatcggcattgctatcggagcaggaacagacattgccattgacgcggcagacattgttctgatgaaaagccggttaagcgatgtgcctgcagccatccgcctcagcagagctaccctcagaaacatccacgaaaatcttttctgggcatttttctacaatgtaataggaatccctcttgccgcaggcgtgtggatccccatctttggctggaccttaaatcccatgttcggggctgccgccatgagcctttccagcttctgcgttgtcacaaatgccctccggctgaatctttttaaggttcatgatgcaagccgggacaaaaaaatcaaacaggctgtttccattctgcctgaaaaagattataatgaaagtaataaagaaaaggagactacttctatggtaaaaatcacagtaaatgttgaaggaatgatgtgcccccactgcgaggctcatgtaaatgaagcgatcaaggctgctttccaggcagaggatgttgtttcctcccacgaaaaaaagacaactgtttttacttctccggaacatgtggacgaagataagatccgggaagttatcaaaaatgcaggatacgaagtaaccggaattactgaagaataaaccggatactacaaaatgtatctgcactgctactgaaatacaaaaaacgggtcatggtcatttttgtccgtgatccgttttttacagaataagggggaaatcatggatacgacacagaaaaacagagaaaataaaagccttcgtctgattcgcttctatgccagacgaatatggagggatgcgtcaaatcttgcaaaatggcttcttctggctgtccttacaggtctggcagtaggagccataagcagcgtctttgcaagagccctgaaatttgtcacggattttcgtatgcagaatctccaggtatttcttctgcttccaatttccggtctgtgtattgtattcctgtatcagaaattcggaaaggatgacggaggcaccaaccaggtgctttctactatccgttcacaggatgatgttcctctgcggtctgctcctctgatctttgtctccactcttctgacgcatcttacaggaggatccgctggacgtgagggcgctgccatacagcttggaggaagtatcggcaatcagcttggcacctggttccgtcttgatgaagaggacagacatgtgattgtaatgtgcggcatgagcgccgccttttctgctgtttttggtacgcccatggctgccgctgtattttccatggaggtagtaagcgtaggggttatgtactatgcggctctccttccctgtgtgatcgcctctctggttgccgccagatttgcagtcagcttcgatatccatccggaaagctttcatgtatccgggattcctgagctttctgttgcttccgggctgaaaatgcttcttgtggcagttggctgcgggatcgtaagtattcttttctgcgttgccctgaaaggcattggacagctttattcccgtttcctgaaaaatccctatctgcgtattgtcgcagcctccggagctgtgattgtaatcacgcttcttctccagtcagcagattttatgggcgcaggaaacgggctcattgaaaaagcagtggaggaagaacaggccagaccctttgattttctgtggaagctgattcttactgcaattaccatgaaagcaggcttccggggaggagaaattgttccctccttctgtatcggcgctacctttggctgtattatgggacagcttgtaggactttcgccttccttatgcgctgcttccggaatggcagccctgttctgcggcgttaccaactgtcccattacctccatcctcattgcctttgaactgtttggatttgagggcgtttcctattacctgatcgcagtctccatcagctatgctgtttccgggtattatgggctttacaaagatcagaccattgtgtactccaaatataaggcaaaatatattaacagacacaccagataacaaaaacatctctgtcggaaccgggattttactccccggttctgagcagagatgttttttatcttctctttatgtgcagttatttcgctgcccgccagctatcctgacttaacaggaaagactattttacatctgtctcatcagatgattccagtccctgcgcctggatgaatttcacggctttttttacgtcggctacatcaaaacttctgccgataaaattttaagatcaatactctcctactactgtagccttaataagattcgtatttccggaacgccccagcggaactcctgctgtcagaacgaccacatcgcctttttctacataaccggctttttctgccgcctctgtagcgtggagcagaaggatttccatgctgtactcttctttaatatgaaccggcgtgatgccccaggacatgttcagctgtctgcatgtatgttcctccggcgagcatcctacgatcatgcagcccggacggtatttggaaaccattcttgcagtgtttccggaacggctgactgtaataatagcttttgcgccaagatcaatggcagtcatacaggttgcatgggaaatcgctgtcgtcatgtttgtggtagttccatgatctctggaaagaatgttaaattctttattatatgcaatatcgctctctgtacgaagggcaatctttatcatggtccgaagagcttctaccggatattttcctgctgcagtctcaccggaaagcatgatcgcgcttgttccctgataaatggcatttgccacgtctgttgtctccgcacgggtaggtcttggatttttcatcatagaatccagcatctgagttgctgtgattacctgtttgcctgcattataaaccttattaatgatctctttctggataacaggaacgtcttccagaggaatctccacacccatatctccacgggcgatcatgattccgtctgccacttccataatgctgtcgatattatcaacgccctgctgattttcaatcttggcaataatattaatgtcacggccgccgttttcatccagaatcttacggatctccagcacatcctctgctgttctggtaaaagaagctgcaataaagtcaaagccctctttgattccaaaaaggatatcctctctgtcttttttgctgataaacggcatgtttacatttactccgggaagattcactccttttttgttggagatcactcctccgtttattaccacacagtggatttctgttccttggatcttttcaaccttcaggccgatcagaccatcatcgatcagaatactgtcgccgggcttcacatccttataaagatctttgtaggtaacagataccttttcttctgttccctggatgtcctctgcagtcagaataaacttctggccttctgttacagtaaccttgcctttttcaaattcctgaatccggatttccggtccctttgtatcgagcagcgcagcaatgggtctgttgatctttgttctgatcgcctttaatctttcaagacggcctttctgttcctcatggggaccatgagaaaagttaaatcttgcaacatccataccttcaatggcaagctgttcaagtattccttctttatcagttgacggacccatagtacaaataatttttgttttgcgcatatcacactctccttctcaaatttttacgaaatatagatttattttataacagaaaccatattttacacaagcaaatttatgtaaaaaaatcgtagaatcatctaaaaatttataagatccttcagaacctctcctgcaatgatcagtcctgccacagatggaacaaatgccacagatcccggaacggaccgtttcttaggggctgtctcggactgctcctcactgtaagaattaagcgcctcctgagaaggcatgaccggaagttcctgagaataaaccactttcagcttttttattccccgttttttcagttcacggcgcatgacttttgcaagaggacacacggatgttttataaatatcagccacctgaaaggctgtgggatccagcttgtttcctgctcccatactgctgataacaggaactcccgctgcattggcttcttcaacaagctgaagcttggctgtcactgtatctactgcatctaccacatagtcatactggctgaaatcaaattcatcctttgtttcaggcagataaaaacacttgtgcacatgtacctttatatcaggatttatatcaaggatacgctccttcattacatccactttatattttcctatcgtacttctcaatgctatgatctgccggttcagattcgtaagacttaccgtatcactgtcaatcagatcaatctctccaataccgcttcttgcaagggcctctgccgtatatccgcctactcctccaatgccgaaaaccgccacacggcactgcgccagtctgtccattgccgcttccccgaaaagaagctctgttcttgaaaactgatttgccataattcctttaccccactaatttttcgtaatcttcttttataaaacgatgataaaccgtatgtcccatttccatttttatacagtaataataaggatcgatctcttcatcctgaaagtacaaaacataatcaaaatcattatcctgtattttacagcacacataatccggactgaactcagcaaagcaggcgcagacgtcatccacggaaggattatggctggtcccgaaaagctcaatcacagccttcagaaaaggcgggtctgaaatctcccggtgaacgtactccgccccttccgggggaatggtaacctccacccttcctctgctttcccggaaagaaacctgtcccagtcctccggtcccaaacccggctgaaccattcagctcattaaggatccttcttttctgctttttcctttctgtctcggagcaattcccgtcagccggaaatagtttatcctctgaatgtatgcctgaaccttcttcctccagagtttctcccagaagaaccataaaggagtcccagggaaaatacagcctgatactttcccggacaaatcccagtttcatctgcgcttccttgatctgatctgtaatattttttataagtctttgttttttcatgatcgcattctccataaaatcagttttcccagattgacagaaacttatgaacctcctgtgttccatacctgtgaaaaccgatatttttatctctctttcagcctattattcaggtatgtattatatcatatctgtattccgttcacaagaatcctgtaattgtcgtatagacagctgctattttacattgttttgactttttcttttcaatatctacaaattttcgtgctatcctgtaagaaatctgataaaatataaaaaagaaacggcagcttcagccggctactgtcaaagcgctgccccaaggaggatatttatgaagtttaagctgaacgatatggaaaagaaatggattctctatgatgtgggaaattcggcatttacccttctgatcgctacgatcatgcctatttattttaattatctggcagatcaggcaggcatttccgaagtaaattatctggcttactggggatatgccacctctgctgctaccatcattgtggcagttctgggtcctgtacttggcgctgcctctgacacaaaaggacgccggaaaaaaatattcctggtttctcttctgattggagctttaggctgtgtttttcttggattcactcagtcctggatctggtttctgctgctttttgtaattgcaaaatcagcctactctttaagcctggttgtgtatgactccatgcttccggatgttaccaccgatgaccgggcggatcaggtgtctgcccagggctatgcctggggatatatcggaagctgcattccttttattttaagcctgatgcttgtacttttttatgataagatcggacttaccatgaaaacagccatgggaatttccttccttctggtagctgtctggtggatcgtaatgagccttcctctgctgaaaaactaccggcagaagcattaccagtcagtagcttccggcaacaacctggctgccagcttccgccgtctgaaaggagttttttccgaactgaaaaacaacagaaaaatcctgtttttcctgattgcctttttcttttatattgacggtgtgtatacgatcattgatatggcaactgcttacggaaccgctcttggccttgactctacaggacttctccttgctcttctggtaactcagatcgtagcctttccggctgctctgatctttggcagactggcgggaaaggtcagcgcttcacggctgatcactgtttctatcggagcttattttctgatcgccctgtacgggatcattctcaaggaacagtatcagttctggattctggctgttgttgtgggaattttccagggcgccattcagtccatgtccagatcttattttgtaaagatcattcctgcggacaaatccggtgaatatttcggaatctacgatatctgcggaaagggagccgcctttgcaggaactatggttgtttctctcataagccagctcagcggcagcgtaaacctgggcgtgggcgctctttctgttatgtttctgatcggaattttctttttcctgaaagcagataaaacacctttgaaataagaataaaaaaacgggggcgttatgcccccagaaattctgccagctcttccagtgtataaactactttatccgctcctgcatccagaaaacgctgtgctgtttttttgcatttttcctgctgctcctgccaggaaagagcctcaaattcttcctgagaaagtccaagctcagagcttccgacaattactcccacggaaaatgcgcccgcattttttccttcttttatatcagaaaccgtgtctcccacctttattacttttcttacatccataattccaagcttttccatatttctgtatatcatatacggataggggcgacccttctgttctgtggaatccgggctgaaccagcagtccggctcataacccttttcttttgcagccggagctacaatctccatcattttgtctgtatatcctgttgtcgaaccaatggcatagccctttgtacgaagacggcttattacctccggcacacccggtttcggatctgcaaacatatgaagaatactcagaagcttttcctcaaaaatcccaaaaagctctttcacattctcttctgttggttcctttccgtacttttctgtccagcatttttttattctgggcatattgagcatggtacggatatgatcgattttcagcatccccattggttcacgaacctcctccatagtaggttcaataccataatgtttaaatacttccacaaatgcctgaaccggcgcaaagcatccataatctacggttgttcctgcccagtcaaatatcacacattcaaactgtttcatcttcattcctcctgatgattcttataaaatctgatccgggaatgtccggatgcaggataatcctgtccctgatatcccctggatcttatttctgtatgcctccgtacagtccttattttcctgtactgtccagaaactcttttacaagatttacaaccctttcaatatcctctttatagatttctccaatgtttccgatacggaaagtttccgcctctgttaccttacccggataaattgcataacctctgtctttgatataagtatacatatctgcaaatttaaaatcataattctccggataaaagaaggttgtaataatcggtccctgatgctctccgtcaatatacgggtggattccaagctctttcattcctttgatcagaagctgattgttttctttgtatcgtctgctgcgcgccggtattcctccttcctctttcagttccttcagagcctgggcaaaggccagaaccacatgtgtaggagatgtaaagcgccatttaccgtccacttccatggttttccactgatcataaaggtcaagagaaagacttcttgcttttcctttactttctgtcagaagctttctgtctgcaatgataaatgaaaatcccggcacgccctgaatacatttatttgcactgctgatgataaagtcgattccccagtcctttaccggaatatccactcctgcaaagctgctcatagcgtccacaataaagacttttcccatgctctttactactttacctaccgcttcaatatcattaaggataccggaggttgtctcactgtgtaccatggcaacatgggtaatggaaggatctttttccagcatttcccggatcacctctgcctttggaacctgatcataatgttcattatagatcacataatccattcctgcgtgctccgcaatatctgccattcgttctccgtatgcgccgtttgccgcgatcagaagcttgtcctcttttccgatcacacttgtgagaacagattccacaccaaaggttccgcttccctgcatcagcactgccgtatactcttcttctgatacgtgagccagtttcagaagctcttttctaatctcctgtgtgatctgtttataatcgtcatcccaggtacaatggtcgaacatcatctccccttttacagtatctgtggttgtaagaggtcccggtgtaagcagtttataatttttcattttcagttctccttttatctgttgatctgtgtttatttttcactgtctgccaagatacagacttagtgtaagctctttattttttacattcttcagacagtttctgatgtttttccagaagctcaactgtcagtttctgattaaatacctcaggattggcagaagcattttcaggatctgttatctcatctttatagagagcattggggtatgtttcctgaagcttctctctcccgttctcgattatgcactgtgccatttccatggctgttttatctctttttgatcccttatccaacactgcgacggactctgtaagggaaaaatttccttccgccggatctatataatctacaggaagtcctgccttcttgtctgccactgcctgatgccgcaggccgaagccgatggcaacctctcctgcccggacttttttcagtggtcctgatccggaatcctcaatatgaggccctgcattttcataaatccgggtgagaagctcttttgcctcgttttctccgtatgcgtcaatgagtgcctgcaaaagcagccaggcagtagatgaagaagagacatctgtaacagaaatcatgtccttgtaaacaggatctgccagatctttaatggattccggcacaggaagtcctgatgattccattacttttgtatttatgataagcgctccctcctgagctgttacaggagcacagtaagaaggaaactcttctgttgtattcaccggaaaggtcagatctttaaacatctgattctgctcctgagcgctgtcaatataaaaggtactcattgtgatcagatcggcttccagattctttccttctgccagaagcttgcctcccagctctgatgtaccaaaagtctgcatgatatattttccccggtatccatttgcatcaagcgattctttcatggcctcaaccgcctcgtcatctccattggaataaatcactaccaggtcactgttgcgtccgcctgttcccagagaaactgcggaaatcaccagaatcgctgccacagccacagctatgatcctttttgcagttcggatccccgacgaaaccaactgaacatttcctgctttttttaatgaatattctgcagtttttgacttacgggaagcaaggtatccaaacaatgcctttgctgcaatatttgtaaaaagaagcagcagcgaaagaacaaaaatttcattgtatttattgtaatactgaagctgtttgatctttgttgtaatcaccatcgtgcgggctccggcaaggaaaatcactgcactgatggttaccattgcattaataaagtaatagctgaacacccggattatggttgaaatggcgttgggtgtaacaactctcaggatcgttttgatccagctgtcgcccatgagcatggctgtagtttcccaggaggcattcatctttgcaagagattctttcatcatcagatacggcgttgaaaagaaatgaatcatattgcagatcaccatgatcaaaaatgtattctgaataccggtaccggaaaaacagaacagaaatgcaagccccagaaccattcccggtattgtgtttgttaccattgcgataccgtcaataatctgtttaaaccttctgctcaccttgcttcttgctgtaaccagagcgcttccatatacaagcagcgttccaaaaactgctgtataaaaagccacataaagggaattcagatacacattcgaaagctctttatcccgcagcacattccgtacgttttccagtgtaaaatgaatctcatagggccattcctccacaaaaggaattacaaagatcactgcaaaaactgaaagcacacaaatgcagatcgccacagaaagtattccaaaaacaacatcccttacaggactttttttcagatcttcctgagagattttgttatatctgacattgtatttttccagatatttcaaaactccgatactgatcacagaagggatcagcataaccattgcaacaactgcgccattattaaaatccggtacacttccaagcatctgatcataaagaacgcttgcaataacctcaaattctcctcccaccgctgcaggaataccaaaatctgtaaagctcaggaaaaacgcctgaacaaaggatgctgccagagttcccatcagaggacgcatcacagtcatacggaaggtggcaaatgccttatctcccataagtctggacactgtcataaattttttgtcaatatatgccattgcatttgacagaagtacaaaagataccggaagagtataaatcacatagccgagaagcagtcccttaaatccataaatggaaaacagctgctttcccagaagctttgtaagaagtccttctcttccaaaggaataaataattgcaaatccataagtaatggttggcagaagcatgggaagcactgcggcagcttcaatgagcttcttaaagcatttatttacatttgtataatgaacggtataagccatcagaaatgcaagaaaagtagtgaccagagcgcttgttcctgcaatcagaaagctgtttcccatagctgttataaagcctctggagccaaagacctctttataaaaagcagttgtaataccactgtctccaagaaaagatttcgccagaagtcttgccaccggaaccacaaggaacgctccgaacagcagagctactgcaagaaaaataagctttgtttctttatttcttccgttcatttttttgcctgcccctgccatcaggccgaaacctcctgctggctcagcatggtattggcaaacagcatataaatattatttcttttaatctcaagctgattaaggataaactttttcacaaaaggattttccggatgagtaatgatttcagacggctttccatattgggagattccgcctttctcaaggatcagaactttatcggaaatagtaagagcctcctccggatcatgggtaacaataatcgtagtcagattataatcctttgcgatcgccctgattttatctttaatcgactctttgatcacaccgtcaagagcgcttaaaggctcgtccaaaagaaggattttgggcttcattaccattgttcttgcaagtgcggttctctgtttctgaccaccggaaagctgatcgattcttttgttcagatactcttccagtccaagaagttctatcagctcctgaacctcctcttctgtagaaatgcccggattgttccttaatccatacgtaatattttcatatacattaaggttcgggaacagggcataatcctgaaagacaatattaaatccccgcttttccattggaacgtctgtaatatcctgaccgttaaaaacaatatgtcctccgtctgcctcagcaattcccagaataagatttaataaagttgtctttccacatcctgaaggtcctaatatagaaataatttctccgtcttcaatattcagattgatattttccaggattgtaacaccgtcatatacctttttcagattctcaagttttaacatattcttctccttctcgggactgtttttcacccgttctgctatcgaacatttacctgtctgtcctgaaacaccgtcattatagcaacagtattacagccctctcaatcaagaaaaaataaagactttgttaagcgcttgtaaacttaacaaagtctttacactgtcaaaatgtagtaaacttacaaagaagaatatgccttatcgcggacccctctgctgcttttatcaagaactgtacaaaaacggtcgtaatcggaaacgatcaggcccatatagatcatatccacgatcatcatctgtgctgttctggaaaaaatagcgtctccgtaaaaaagctgctgttgactggtgcagattaccagatctgcgtatttcgtaatcagagaatccctgaaatttgtgattacaatggtaactgctccgctttttttcgcctctttcatgacctctaccgtatctctggaatatccggaataggaaatccccactgccacatcctgagaagtcagatttcccgcactgatcttctgatgataataatcatcgaaatgtctgcaggaaagcccaagatacaaaagctttgtcaaaagatcagacgccactgcatttgaattttccacactgtagatatctatgatccgggcatttttcaatgcgccgatcacctttttaaacacctccgatgacagatttttcagcgtttcctccatcatcatctgagatgtcactgccacttttcccggaatatcctccagacgatcctttctgctgaggttatacccgtacataggatttgccctgccgtcctctttcctgcttcctgcaagctgttctaccactgcatatcggaattccttatagcctttaaatcccaaagctttggtcatccttacaatcgtaggctggctgactccgctgtttgcggccagcttttccagagaaagctcccgaaccttatccatatgcgccagcacataatctgccgcctgcttttccgacgaacgcatatccccgtatttttcttctattaaaatagcgatcctgtttttcatttcacaactccttgtagaaattctacagaaaataacgcttttcgcagaattttcttttttatcattttatcagacctgaaataaaggtctcttacacggagttgttaaatctttgtaaaattgccggatttttatttctttctgcctttattcgtcaaaatttacttcaaaaacgccctccggcagacgcatggtaagaataccaagattaaagtcctgatccatcacagtgatgtggtactcaaaaattgcgtcatcttcaaattttgacaataaaacataggaaccattttccttaccgtcaatctgatcgcagatatcctcataaaccgcttctccagaaatcgctctgggatatccgcagctttttattttttcttctattgctttatataattcttccatgtaatttcctccttatatgatcagacatttttatttttcataaggacagcggtagcgtggctttccaagtgattttttcccatattcaatagattttgcaggacactgcgtaatacacgccatacagtgagtgcatttgtctccccactgaggccgtccattcacaagctgtatattattcagcggacagacttttacacatttcccgcagccggtacagcagttatccacattaaatttatttgcatgcacaaacagtggataaaagagcagatttacggggccgctgcacaccgcaccaagcatactgaccggttcttctgtaagaggatctcctgcaagtatctgctcttcaacctgccggatcttcggctccgcatctgcaatgatattttttgcctcttcctctgaaggaacccggaacatggcaagataattttccggcatcagaatccccacgcagcccatataggtaaaaaccttatcctcgcaaagctttctggcatattttgcagcatttccgattccgtctccacaggtcataacaaaatatgctttcattcctatgtcaaatttcgactttcgaatccaggtttccacaatttccggaattctccatgcataagcaggcactacaaaaactgctgtttccggcgtttttccggagaaaaattttttctgttttatggcttcattcagagaatacatttcatcccctgttttctcctggatcctctttgcgataaatctgctgtttcctgttcccgaaaaataaaaaatcatctggacctgctcctttctgtccgttcagttcctcatggaaaattttctttcatcctccaccagaggaagctcttttacatccatttgttctatgctgatgtagcggtcatgaaacagagcctgaaggatcatgtcaattgaaacctcttctccctgaacctgcgccgttacagagccgttacattcattctgtacccagcctgttgcattatatttctgtgccagataatacattttgtatcgaaagcctactccctggactcttccccaaaacgaaaatcccctgcgtatttttgtccccatagcatcctctccatattcctcaacatttattttctgaaaagctgatacaccaccagcgctctctcagttccttccacagcactttttgtacttctttccgcttccacagggacacggatcatttgggtaaacctttttattcttttcctcattcaccagtatattactctggaacgttccaggaaactgcggatttcgttcttcttccggcgcatgtccgcacagctgtacttttctggttttactgtaagcttccaccagaagctctgccatttctcttgcctgatcctttgtttcaaaaataactccgtttttgttcagctgttccattgcctctgacataagtccgcctgtataatatactctgtaaatttcacagagataggcttctgccagttcttccggcatttccagttcctgttcaagaaactgtctgatttttttataaaccggctgcttagaaggataaccattgaatgtacagtcaacaatctcctcctctgaaggaacataaaactctctgtctccctggtatttcagcagcatccgatagatttctttttcttccagcaatccctgaaggctgatcctgtcgccgtcaagtacacagatattttcctcttccggaacagaccggaataattctgtaaattcctcaaagcttactctgcattctcttcttctgcggtacattctgtatacaactcttgcaggagctgtgccgtaaagatattcaaccattaccagacatgcgctcagccagcttctttttttctgaagttcacaaaactccgatgtacaaatcttttcaaaaacagcagaaacctctgaaggaacctctgcatatccatcgtcataaactgccagatatccgatatcgctggcccattccagatctgtccattcattttcctctacatggaaaagaccttttttcattgctttttcaaaagcctgaaattcccattcattcagtctcagaagctccttttccataacctcaggcttcaggatctcttcggcgatccgtcctgccagttcctgtttatcaagtttctcagccccggaaatccccagctctccggccagaaaaaccagatcctcctgttcatatgcctgcagatactctgcaacctttggatttctgctttcggctgtttttttcatttctttaaaaagcgcttttgttaccgtctctgccatatcctttaacagagaatcggtacattttttattattttctgttttgctttccgcattttcgctgaaaatcagagaggcttttccctgacagatgtcctcatgaatctctttactgattctataatccggctctcctgcctccagtgtgaacagctccgccagacgtttatttttctgctctgtatccgaccagaactcttcctctgcgcctgttttttctttcataatcacaggacaaagagcccctccatcctcactgactgcaggaagctttttttccacctctgccctgtattccggcagtttctgctcattcgtctttacccggaaggtaaaccatgtcatcttatccaacaggtcatttacaaatgtatcggaagcatttgaaaaatcatactgataagaagtcacctgaggttcatcttctctgtattctcttacatgaaccttttcctgataaaattcaaattcatatctgtcagtaaatgaatactcaaggatttcttccaggactgctgccatctgagcaaaggtaatattagaaggaacaagacatcttctccaaaccggcggttttgttccctttcttataattttaagctgataaaattccatgttttctctcctgtatctgtctttctggttatcttttgttactgttcattctatttacagcaacttgggcaaaatgcattccatatcgcctttggcgatggcattttgccctttatgtctccttctcattttctctattctacttcatattgcccaaacacacaacagggttttgcaggacaacgcataaaacagggattaaataaaaatacagggaatatctatccttccgaataaatatcccctgtgtcagttatctgcatgtttttactgattttatgccttccttgtaaagattctttttatccttgctttaatgaccggattgtctttcactgcatcaatcagtacagcaatcagaactaccgcgcctgtaacgatcgtctcccagtaagaagatacacgaagtaatgtaatacaggtactgataacactgcttaaaacaccaccaatgatagttcctaccacatttccaattccaccggccatagatgttccgcccagaacagaagctgtaatagaatccatctgccagctctcgccaatacttgcctggaaggatgccagtttacatgccatcagcacacctgcaatggcagagagaagtccgctgagacaatataccatcatctcaatacgttctgtaggaatacctacaatttttgcacagcttctgtttccgcccaaagcatatacataacgtccgaactttgttctttttaatatgactgtaagaatcacacagataataaccatgataattacaatgtttggaagaacgccgccaattactccatttgcaagtttttctgctgattccggcatacccgtgatcggcataccttttgtaataacgtatacaatacctttataaatctgcatagttgccagagttacaataaatggtgtcattttaaaatatgcaataaaaaatccatttactgctcccagtacaattcccagaaggctggcgatcacaatggcaagatatggattgattccataattcaccataaagatagcccccgccataccgcacacagaaccgatagttgccactgacaggtcgattccgccagtcagaagaacaatcgtctgtccaaatcctacaataattacaaaggatgcagctcttgtcagtgtactgatattatacgccgtaaaaaagtttcctgtggtggcatgtacgataatgccaaccagaatcgttacgatcagaaccatgccagccgtggatttaaaaaatttctttatcctgtccattttgctgttttacctcctattgaaaagctactttcagcacatcctcctgtgtgatcaaatccacatctgtgatgtagccgctgattctaccctgatgaacaaccataatcctgtcagataaagccataacctcttccatctctgaagaaattacaacaactgatactccattgtctgcaagatcacggataagctggtgtatttctccttttgcatttacatcaataccacgagtaggttcatcaaggatcagcattttaatcccctttgccatccagcgcgctacaataaccttctgctgattacctcctgacagattcttaatcagtgtttctctggatgctgttttaattttgaaggaactaatatatttttcagctgtctcaatcgcctgtctgtaatcgatcagaccgtgtttttttattttgtcataagatggaagcatcatattttccataacagacatgtctggtgcaataccatcatgcctgcgttcttccgaaacatagcccattccatatctgatcgcatctataggggatttgatatgtacttcttttccctcaataaaagtctgaccgccaggttccttttcggtaatgccaaaaacactcttaaaaatttctgtacggccagctcctaccagaccggcaactcccagaatttctcccttatggatttcaaagcttacattctggaactccccttttctggaaagatttctggcctcaaaaaacacttcatcggaaacttttctctggactctacccgtaatctgtacctttttcccagccatctgattaatcatttcttcttttgtgatttcagagacatggacttcttttacaaggcatccgtccttcataatagtgattctgtctgcctgttccataacctcatccaggtgatgagtaataaataccatagctgtgccgccttttttcagcctctgcatggactgaaagagactttctgtctcacgattggtcaaaaccgctgtaggctcatccaaaatcaatacttttggatcataggcaagcgcccgggcaatagaaacaagctgctgatacgctgccgaaagcagctttaccggctgagaaacatctgtctgaacatccagaagcgcaagaagtctctctgcctcctgacgggtctttgtccagttgatcagctttttttccatcacttcatttcccagaaaaatattttccgcaatgctggcttctggtacaagattcaattcctgaggtaccagaacaatattttttctcattgcttctctgggagaggagaacctgaccggttctccctccatgatcatctctccgctgtccattgcaaactgtccggtaagaatattcattaaagtactttttcccgctccgttttcacctaccagtgcatggatttctcctttgcggagctttaaagtcacaccgtcaagagcctttgttcccgggaaggtttttacaatatcccgcatttcaaccagaagcttctctgtattattctgcatctgcactttctccatataacatttcaatatatttatctgcgctgtctgcataaacggaagtggatccgacatttgtagcctcttcctctactgcttctccgtcaattgtctttactgcgttataaaccagcttatatcccatgtcgtagcagttctgaacctgtgccacaaacagtgtaccgtctttcagatattccagagtacgaagatcatgatccatacctccgattacaatatcccctgatttaccggcatccttcactgcctgacatgcgccaaccggattcgacatgttattgcagaggattccgccaagatccggatatgcctgaagccaggattctgtaatgctgattgctttttctactgcatcgttatctctctgctcgtctacaatctcaatgtccggatattctgcaatcgtatctttaaatccctggagacgttcttcatgagatgcggctcccattgttccggaaaggatcgcaatctgtcctttaccgcccatctcttcgcacactgcttttgcaagagcgcagccatcgccgtaattatctgtatttcctacaaaaaagcttctgtcgcagtcttcaatatcactgctggcaaaggttgcaaccgggattcctgctgccactgcttcatccacagcctttgctgttgtctccggctgatttacatcaacagcgatcagatcatatccctgtccgatggctgtttcaatggaatttacctgatccactgcgtccggctctgcaggtccataccattcataatcgatttccacgcctttttctgcaaaatctgctactgccgcatcaacgccgcatttaattgcatcgtaccagctgtggatatttttgtatgtacagtaaattttgtagctatcctttttcggttcataacttgtatcgaaatctgcgtctgccagttcagttttacctgtagcgctgtctcctgcctttgccgcatatacattcacagatcctgtcattgttccgatcattgctgctgccattgccataaccatcatttttcttcttaacatcttaaaatcctccctgtacatttatttttatatgctgtttttctttactggaatttaactgctgccttgatgacttcatccttatgattcaggctgtattcaatagcttcaatacagtccttaaaatcaaactcatgagacacaatgcttctgaccgggatcagaccggaagaaactgctgcaatcgcctttggccagagatttctgtagcggtatacagaataaatagttccttccattgcattcaaagttgcaatatccagctccagaaccggttccggagaaacaccaaccagtgtgacctttcctgcacgtttgatcagtctgcaggtctgaagtgttgtaattctgtttcccgcacattcgtaaacctgatctgcgccgcctcccggaagtgttttggcaaattcttcaatgctctcacgtttactgttaaatactcttgtagcgcctacttccagagccttttccagacgtttgtccattacgtctgcaacataaatctcgctgacgcctcttgccttaaggctcataatagtacaaagaccaatacatccgcttcccagaacaatcgcagtctctcccacctttgcatttgacaattctgttgcatgcattccaactgccagaggctcgatcaatgccccttccagcgtatccatattatccggaagcttatagcacatgcttgcatcatgcacacaatattctgcatttactccgtctctttctcccggaattgcaagcatcctgatattcttacagagattataatttccttttctgcagtcttcacattcgccgcagggtactgccggttcaatagaaactttatctcctactttaaatccttctactccttcgccaactgcgcttactactccgcccggctcatgtcccagagccagaggcccatccagagtccagttagccagctgtccctcctgataaaaatgaaggtctgaaccacatactcctacatattccagcttgatctgaagctctccttttcccggctgaggaatgtcacgttctacccattccagtttctgtttaccggttaatacacatactttcatttttccttccatgatgttcttctcctttatgtcataattatttatttaagttcttctccgtttacattagtacccgttcaactgcttttttccatccgagatacttttgctcagcttctttttcattcatttcaggttcatattttgtcctgttcagcttgttaaaaatattttcatcccacagccctaacgcaattcccgctgcaaaagccggtcccattcctgagagttcttccgcatccggcacctgaaccgctgcccgtgtcatgtcgctttgaaactgcatcagataactgtttctggttgggcctccgtctactcttaattcctcaacctttactcctgcatcttcgctcatggcattgacaatatctgtgatctgataagcaatacactctactgcggcctttaccagctccggcttttttgtagttcttgtcatccctacaactgccgctgttgcccgactgtcccagtaaggagctccaagtcctgaaaatgcaggaaccagataagttttatcatcttttgacgcctcttccgcaagtttttgggtctctccgggagatgagatcagcttcatatcatctttcagccatgtgatcactgcccctgtataattcagattgccttccagtacataatttacttttccgttcatactccatgcaagagaggtcaccactccatgggtactcaaaacaggcttttctccaatattcatcataatagaagagccggttccataagtggatttcgtcattcccggtttcagacatccctgtccaaataaggctccgtgtgaatctcccagaactccgtgtatcggaaccggatgaggcagaaatccgttaaaatccgtttcgccaaagcaggaatctgaatcacatacctctgccatattatccgggttgatcccaaaaagctcacagatctcctgatcccatttcagctcaaaaatattaaaaagctgtgtccttgacgcattggaatagtctgttttatattcttttcctccggtcagtttataaataagccaggtgtcaattgttccatgacagatatttcctgaatctgctttctcctttgctccttccacattttcaaggatccaggcaatcttggatgccggaaaataaggagacagattaatacccgtgcggcttctgactgcttctgcctgtcctgcccgttccactctttcacagatatcaacagctcgcgcgcactgccagacaattgcctgtcccagcggttcccctgttgatctgtcccaggcaagggaagtttctctctgattactgattcccacacccacaacatcacctgccggaataccggattcctgaaccagattccttacagcttccagagtatttctgtaaatctcttccggatcatgagaaacccagcctttttcatttatgatctgcctgtgagctttgtcagtacgtttgatcagattcccttcctgatcaaaaagcagtgcttttgttccctgtgtactctgatcgattcctattaaatatttccccatatcagatcagctccattaccttttttacaattccctgtgcattcagtccgtaataatcaaaaacttcctttgatgttccggaaataaccggctcatcaggtaatgaaagattgatcacctttacaggacaatgttcgcctgtaacctgacttaccatagatcccagtcccccaaacggcgcatgctcctcaacggtaactacagcctttacattggaagaaacacggatgatcgtttctttatccagcggtttcaggcagtacatatctataactgatgcactgactcctttttcatcaagaagctctgctgcatccagggccggtttcaccatttcaccacaggcaataattgcaatgtctgttccttctcttactactgttgccttatccatctcaaaaggtatcttgccctcttcatacacatcctcaacagcatttcgtcctacacgaatataagcaggtttttcatctttaagaagcgcctctgtcagcttttctgtctgaaatctgtcgcttggaaaatagactctcatattgggaatggctgacatggctgctatatcctgcgcagaatgatggctcattcccaaagccccgtagcttactcctccactgatcccaatcagttttacgtttgtgtttgagtatgccacatctactttacactgttcatagcttctggtagataaaaagcaggccggcgaagcagcatatggtttttttccacatttcgcaagtcctgcggaaatacttaccagattctgttctgctattcctgtttctacaaactgttccggatacgtctctgcaaattttgaaaaagaagcgcttccccgggaatcactgcaaagagcaacaatatctttatctttttctgcctcccgcatcagtacatcacaaattacctgtttgtttgcaattttagccatggatcagcgcctcccttctttttctcaaatcagttttaatctgtattacctcttccggtgacggaaccttatgatgccagttggctttattttccatagtttcggagccttttccttttacagtatttgctattactaccgtaggcttatttttcactgttttagcttcatcaaaagccgctttcagctgaggtatactgtttccatctttaacatcaatgacattccagccaaatgcccggaatctttcatgaagatcatcatgtgccattacatcttctgtattgccggaaatctgtaaacggtttctgtctactacagcacagagattatcaagtttataatgagaagctgccattgcgccctcccatacagacccttccgccagctctccgtctcccataaccgtataaacacgatatcctgatttatccatcttccctgcaagtgccattcctacacttactggaagtccatgtcccagagagccggagttcatttcaatgccgggaagtttattattgggatgtccgataaattttgtcccaaatttactaaactgcgctattacatctttaatatcaaaaaatccttttcttgccagtactgcataataggcttcaacagaatgtcccttacttaaaacgaacttatctctttcaggatcattcatattctcagggctgatattcatctgatcgaaataaatttctgtcagaatctccataacgctcatgtctccgccaatatgcccggcttttccctccactatcatatcgataacatcttctctaagctcataggccattgcagataactgattcataatatcctcctctctaaattatattaagttttattaagtttttatttatttgtattttacccccccccccatgtgtaaatgtcaatagttttttaaattatttttactttattttagttatatttgataaatatttatcatcctcgacttatttttctgtatttcaacataaaaaaaacactgatctatagtattttccataaatcaatgtttttatatcaattatatatttagaaaaattaagtttatttcaattgattaacactttttctaataattaattttgtgcctatttcagttttcatagaataatctctgggattctgcattttttccattaaaagctcaactgctgcggatccaaatgcatttttaggaacatttacagtggtcacagaaggaactatcatttgacatacaggtctgtcgtcaaatccaattacagaaatatcctctggtaccctgtaaccattatcctgcattccatgaatggcatgacatgcaataaaatcgttttccgcaataaatatagtgggattctcattattttctgaaaggtattttcctacctcttctctaatagtcttttccgaataatttacatcccagatatagctttcctttatcttcaggccaaattttttcatacaatttttataagcctgatatctttctgaaaaactggtgatacgctctcggcatcgtatatatccgatttctctatgtcccatatcatatgcatattgcattgctttgctgattccctgaaaattattaatagaaacagaatctacatcactgtcctgaaatgaattatccaataccacaaaaggaagtcctgtatcaataaatacctgaagatcttctcgctgcatctcaactccaaatataagaaatcctttacaatccgaagatcgtaattgcatttcctgtacctcaagaggagtacttctattcatatatacaaagctcagattatagccatagtcagtgagactactgtttagtccctccaatatataattaaaaaacggagattcatccacaatttttcctattgtcttatatactacaaatccaatatttccattcgtaacaggaatgtctttaagaagataatcacatcctaattctctgattttttcaataatttcctgacgcttttgatcacccacccctggtttattatttaacacaagtgaaactgtcgctgtagaaactccaagcatttctgcaatatctttcgctcttaatgccattttcatccctcctttcacttaatcatactaaattgtttagaaaaaaacaagtgtctttgccacataaaacaatttcagagaaattttatgtataaattttctaaaaaacatgttatcccaaacaatatattcattttcctgttatgattcataatctttaacaccacaaaaaatacaggaaagctggaatcatcatccatccctcctgtattttcctgtttcctggaatttacatattttccttctttttctccttaaacggcttcataaagatcacccatccaaagatcagcaaattcagtacaagagcagccggtatatccgcccagtggatctgctggttctgaagcacttccgtagaatatgttccggaaaagactacagccatattgttattcagaaaatggatgatcaccggaacccagatattctgtgttttcatatatgcatatgccataaaaagtccgattgtaatacaggtaataaactgacttgccagagccgccagtcccatatccggagtggtataatagaaaaagtcaattggcagatgccatacagcccacacacagcccagaaggatcacgccgcctttcagtccgaaacgcttctgaagaaggggctgaagataatatctccatccgtattcctcgccgaaaaacgccactactgccaggaaaaagtttagcaaaacagtaaaaaacatgatccaggtggttggatttgccattatttttccaaattcagaaagctggccgccaagagcgctggcaattacaagtctgagaaggtacagtccaataaacagcaggatcataagaaccgaagtactccactgattactgttcagtccgtaagctctgcgcttttctttgccggataccagaagaaggatccagaaaacaatacttcctcctatcatgacatactgcagaatcagcatccactgagaaaacggtgtacccataatgtctatattcacaggagccagaacagaggctgccgtacatacaaccatcgctgccgtcagcgccacaaaaaatatgtaaaaaactttgggaagctttttatctcccttcctggtgattaaataagccatcataacgcctgctgccggatacagcatctgcgcattaggaaaagcgctgagatcaattccctttccgtatccataccacatcagaagccccagcacataggtgattccgtatgctatgatcacatagatcataagctgttttttctctgtctgcgtaaatttcataattctcctccttattctcccggaaatactgctgttacggaaaaaatcccgtcttttgtctctatattcagcgcgccgtgatatttttctactgtatggcgcacattttccaggccaattccttcatgcccctgttttcctgagcgtcccggggcgtagacttcagaatagggattccatatttttactactgtaaaatcctgtatctgttcccctcttatttttatccagaaattctttttattttcgcctgcctctatggcattatccagaaggtttgcaaaaatggttgtcacatccatatccgccagaaaatccaggctgataccgcccatattacattctgcctgccccggttccagcttttttaatttgtcgttcagaatcatgttcaacattctgttatctgaataaaatttcagtcccagagaattcagcattccgtgaacgtcctcaaaataaccggccgcatctgtttttgctgactgttccagcatattcagatgatttctgatatcatgtatgattcttctggagcgattataattattttccatatcctcatagtactgatgagtcagctcattctgctgcttcatcagctctaccttctgcttcagctccctgttttctgccagatcataccatacatacagacagtaaatattaataaccagcaaaaggatcatacagaggatcacaccccagaatccatgctccagaaaaaagctttccccggaaatgcagtacagatatataagaaccatactaaacagcggcacaagaaccattcctctgatatgcagttctctctgttcctttaccaggcgttttctgacaatccgcctcataagataagtcacggaaaacatacagatcatttttgccagcacaagtgtataataggagagtatatcctggtaaaaaccaaactttttactgatatatacggtaaaataaatacctatcacctgagcgccataatttgccattccgtagatcagagaatacaaaatccaggttctgcttctgtgatagagaaaccagcagactgcaatgtaatatactgtaagcacggacattgtaataatatcattccaccataatgtcggaatcaaaaaggtcagtacaacaaaaatcccccagacacagtatcttacccatggtttcgactccacctctcttggcatggaatacagaaaccagataaagcttcctgtatggataaccagttcaatgatctgaaaaaagcaatataatacataattcatttccatcatcctctccggtgctccagccgtgccgacagccagacagtcagctcctgtttccatgttttctgttttttctgggaaagaggaatttccattccattgtccagataaatgtgctgtccttttacatttttcacatgaagcatatttacggaaaagctctgatgaggcatggaaaagccaaaatcctccatacgttttgccacatttccaatgcgctccaccatataatattcatcttcatctgtcacaatccgtatccttctgttctcatactcaaaaaaataaatggactctacaggaaggcagacaattccatccactgtgcgaaaatcaaggatgatctttttatccgaggcttccatataccggaatatctcttccagaacatttataatctcctgtctgttcacaggcttcagcagatactgaaatgcatgaactccaaaagctcctgccacataatcccggtaagctgtcagataaacaatttttacatcagtatctacagaccggatagcctttcctgtttctatgccattcattccctgcatgtcaatatcaagaaaaaccgcgtcgtaaggctggtaattttccatcagctccctcccggaagaaaacacccttacctccacctgagacttccattccagaatcatttttctgacctgctcacgaatatttttatcatcatcacaaactgcaattctgtacattcctgccactctctcctgttgtttttactataatcattatacctgaagttgtaaatacagtatacacaagagacaaaaatcatgtactaaatgacagaaaatcgtatacctgaaccagaacaacagagaggccgtttccgaacagaaaaagactgctgaagcctctcaccgccgggtttttattcccggcaatttcaaagcttacagcagccttttatatttttgaataaatctacattcttagctttttgtggaactcacccactgtattcttcttctgaaaaataaaaagtcctgccagcaccagaaagctgattcccgcacagatcacagaaggatacgtaaaccttacgattccggcccacaccaggataatgggaatacatcccgcaattcccgcctgcacaagataaaaaagatattcctccggctccagatgatttaccttggcaattacaggaatggaaccaagcacagccattgccccaaagggaagtacaaagtccaccgaccatctgtgccagcctgtaaatacatcccacaaaacagcaatagccgttatgatcaaaagctgccacatttcatttttcagtatgtttctccgcttggtatatcccacagaaactactagccacgcgcaaaagcttcctgctgccgcaaaccagaaccagttcagagtctgcgcagtcatataattgatcattccgcacagcaccgccgctgccagacaaagaaacgtaaaggtctgatatgcttttctgccctcttttttctgctcttccccacatccgggaaaatcatttcgctcctctgtaaatgaaatttcatcttttttcagatattcaagaaaatttctctgaatgctttccccgggtatttttgaggtaaatcccagaagaagctcgtccccgtaggaacaggagcaaagctgcagcgcctctgtacaggtaaaaaatccaaagcgttcaatatattgttcatattcctccggaaaccgcaccactcctatattggaatatacggttgtgattctcctgcttcccagagccgcgcctaccatgagaaaatacttttttacttcaaggggtacggcccggatcaccggattcttttccagacgtacatagccgttcatgtgcatggcaatcttttcttttacaagctctgtctcaaattgcttttttacatcctccagcacatcctgaaaggtggtcgtctctgtaaatgtatagcccacctcgatccacccgaaaaaatttgccatggattccgaaggaaaaaagtttctcaggtttaccggaaccatcagggtaacaggacgcttctgacggtttctgggaatctcctcatgaatggaacagataaaaattgccgacagatatgctgtaatggaagcgccgtaggagcgcgccttatccagaatttcctttacgggaatggaaatctccagaatctgcatatcgtcatgtcccagcatttctcccttcagcctcactgcgcgaggatttttttctttgtttttcggagtttccgaggaataatactgggaaaagctgtcctcctcatgatcccggaacgttgccctctgccgtgtctccgtttccggaaaccgagtctccggatgctgcagtttcagataattctgcaccagctcctgaagaaaattcctggctcccgtaccgtcggtaagtgcatgatatacttcaaaattaatacggttttcataataggaaacctcaaacaaaagagctttcttatccggaatataaagcctgctgcacggaggttttacttccttctttgcaacagctctgatatctcttctttccagatagaaccagaataacccctttctcaaaaccacttgaaaaaggggatatttttccattgtatgatccagggctgtctgcagtatttccggatctactgtctctttcagctcacagtacatccggaaaactctggtatcattcttatccgttgcgggcggaaatgccagcgccgcattatccagtttccgccagtttgaatatcctgatttcacgttttccgccttctctcctataatagttcaaatatatcatagtcttaatgaacaggcaagaaaggatttgagcagacttttccccactatccacaaatttttctgttaaaatataaaacaatctttttatggaaatgggcaagaatcagacctctctttttttcaaaaactcattcatatgccgaaagctttcctgcacatgaaaaaaccggatccccagtgcaaaatatccatggagcgcattggaaattctgtgtacctccacataatttcctgcctgttccagtctgtttccgtattcttctccttcatctcttaacggatcaaactctgctgtcagtatcagagtatccggcatatcagataaatccttttccattagcggtgaaaaatagggattctcccgatcctgcgggctgctctcataaagcttcagataattttccattctctcagaggtcagcagatagtctgttccgttcctgtgaaccgactcatagggagactgctctgtatagcagttgcccagagccggataaataagaatctgcctttttggcataaattctcctctgtcccttgccatcaggcacaccgctgctgccagatttcctcctgcgctgtctcccatgatcgtaattttatccggatctatattcaggtcatggtctgtatacagttctctggccgcagcatagcagtcctccagccctgtcgggaaacgatattccggagccagcctgtattctactgaaaccacaatatgctctgtatcctgagccattcgggaacatacccggtcgtaattttccacgctgtccgtcacccagcctccgccatgaaaaaacaacaggatcggacaggaacgtctctctgctgtgtccattgtcataacatcctctgacggaaaataaacgcgcacgggaacctcatattctccgttatacacctttgtatccagtttttttacaaaaatcctcattgcatccagttttttgagatccgccagacgtctggctgcctccacttcaacattactgtatgatagcgcatgtaaaattgcgcgcattgtctttgatatcaatacgttgtcctctctgtttatctcatttttacgtttccatcatatcatcatcagttttgtatgacaatcatttcccgaatttatcttatcaatgctgttgcttttattttcttttctctttcccttaaaaatgttatacttgtctcataaatacattctctgccgtttcctggattttttctgagacaggccggcatctgatttcatttacttacagaaaggagctttcaatattggaaaataataataccgccgtacaaaatccactgggtacggctcctgtcggaaagctgattgccaaatttgcaattccggccattatcagtatgctggtcagcgctctttataatattgttgaccagatttttattggccagggagtgggaatgcttggaaatgcagccacaaatgttgcctttcccgtaacgattttttccactgccaccgcgctgcttctgggaatcggcagcgcatccaactataatcttgaaacgggcgccggtcacgaggaacgcgccagcggaattgccggtaccggactttccatgctggtaatctgcggagcaggcctgtgcgctgtggttctgctgtttttaaatccgcttttgcatctgttcggcggaacgcctgaggttatgccttatgcgcaggattatctgagcattacagctgtcggacttccattttttgtactgactacaggcggaaatcatctgatccgcgcggacagaagtccaacctattccatggtatgtatgctcaccggggcagtgatcaataccattcttgaccctctttttatttttgtattcggatgggggatcaaaggcggcgcctgggctactgtgatcggacaggcagtttccggtgttcttgtgattatttattttgcaaagttccgaaaaatgcgcctgacctcccatatgttccgtccccgtatggaatatctgaaaatgatcgcctcccttggaatggcttcctgcatgaatcagatcgccattgccgttgtacagatctccatgaacaatatccttcgtcactacggagcagattctgtttacggtactgacattcccattgcctgtgtcgggattatttccaaagtaaatcaggtatttctttctatctgtattggcatttcccagggctgtcagcctatctggggctttaattacggagcttccagatatgaccgggtacgtaaaacctaccgttgctctgttactgcctgcacggtaatcgccactgtattttttgtgtgttttcagctgtttccacaccagatcgtgggacttttcggaaccggaagcgagctttatttccagtttgcggagcgctatctgaaaatatttatgctgcttacctttgccaacggaatccagcccatgtctgcgggattttttacctctatcggaaaagcaaagctgggcgtgatcatgtcccttacaaggcagcttgtcttccttcttccgctgatcgttattttcccgttatttatgggaattgacggagttatgtacgcaggacctattgccgatacggctgcctttatccttgcagtcgtctttgctcagagagaactgaataaaatgaaaaatgcagaaaaatttctttaattggatggcatattagaaaaatcccggggatatttcctgggatttttcatgcctcttatctccgtctatgtaccataatatcagtctgtttcgttcagctgatctgccatcttacgtggcttccggcctcatccttggtgacaatcagctgatcctcaatctcctgcttcagctctgtcacatgggaaataattccaatcagcttcgagccttccgccatttccagcaatacctttacagcctgatttctggaatgttcatccaaagagccaaagccctcgtcaataaacataatatccagactgatggccgcagagctttcctggatctcatctgccattccaagggcaagagaaagcgctgccataaaggattctcctccggaaagcgtccggatctcccgctcttttccggtaacagtggaatacaccatcagatcaagacctctgtttttaccttctcctgccttttccagatcatacatacgaagctcaaactggcctgcagacatatcctgaaatctgcggttggccgcgtccagaatcttttccagataataacgctgcacataggtttccagatccattctggaaccgctgacattgccggaaacaaggcggtaaagattatcaagctttgcgtgttcctccaccagacgcttcctatcggtaagtattggagcaagggtatcatagacagcctgattctcctgatatacagactttatcccgtccctgatgcgtcccgaagcctcaaagattttctctgcttcctctgcctgactacgtttttcttccagcacaggacgctgtctttctccgattgcagctctcatagaccgtgtgctgctttttgccgctgtctgtctgttgcggaatgaatttacatcatttctgaactcttcagcagcatatttttcatatatgtcagtaagatttttccactgttcttctgtaagatttttctcctgcaaaagtgtttcgtagatttttttctgcctgtctttttctttttttcgtgcgggcagctctttctcataccgacggataagggtttctgcttctgtttttttctgtctggtacattctgctttatttctggcttctttcagaacttcttctgtctggttcttcctgttttctgccatatttctggcgttttttgcctcttcctcagaagaaaaatcagaggatgacgaataacctgcaagctctgatctggctccttccagcgccgcctgtacatttttttcctgttcctgaaaagtttccatattttcttttaaagaaggcttacgtttttccagttcctccagtttttcctggatttctcttaatgtctcagcctgtttctgatacgcaaactcctctgtctgaacctgctgcttccactgctttatcagttcccgcgcctgtcccggagaaaagctttccggaagcttcggaatactcctgcgcattttatcctgtaatttctcaaaattctctctgaaatcccggtctctggcatctctcagattagtattagactttacttctccggaaagtgtttcctgttctttgcgtaggctctccgcatcatttccaatttggtctatcttatcctgagaaagctctctgtgctcttcttttggaatgcagggactgggatgctctgttgctccgcagacaggacaggggttcccgggcttcagctctgctgccagaaatcctgcctgagcatccagaaaagcgcgtctcagggtttcatattcctgctgttttttctcatatttatcccggatatccgcatatttttgttttaactcttctgcagtctcattatagctttttatttccttataaataattgacagccctttgatatcatccatcatcgttccgatctcacgcattttggactgacatacagcaagcttttctcctgcgtcagaaaatgcttctgcctgcttccgatattctttttcctgaatttctgatgcctcaaaagcatcttttgcttcttttttctgcttttgaatctgcagaagattcttttccagcttctgcacttttttgcggcattctcctatctgacggaatagttccagagccttttctgccttttcagatatgcggctgaactcatcctgagcctgacgctgttccttctccgctctttcttcttccttctctgcctccttttgtattttcagaagctccggaagttggctttgcagttctcttaaagcagtttctgtactctctgcctcctttcttttttcttccagctgatcactggatgcttttacttcccaggccgcctggatctgacctgccagctgttcttttttctccatttcagaggtcagttctctgcattgagcaagctcctcttccgcctgatccagctgtaaaaaaagtccttgaagttgctgggcttctgtatactcatctctttttttatccctgttttctgccgcttcactacagtctttttctgctgtttgcagcttcttatccagaactctgcaatactggaatagtgtttccagaaattctcctattacaacgatctccccgtctgcaatctgcttttttagcttatccaggctctcttccagaacctctgtctgctgcccaaactcatcctgtccctggttttccgcactgtctgacagaagttttactctggccgcttcactctgacaccgggttctgatatcagcaatatccttttcttttgccctttttctgttccccagctccacagcaatatcctcgtacatttctgtattaaaaagcctgcggaatatttttttcttatcatcagattttgccctgagaagctccataaactctccctgtgcgatcatggctacctgcataaactgatttttggtaagtccgatgatctcctggagcttcccattggattccttctgaggatattctgtaccgtctggcatgatcagagatacagaacctgtaatctctctggttccgacaccctttgcagctcctctggtgatctttttcagatgtctgggcacccggcgtactgtataaatatcctgctcctgcccgtctgtaaattccagttccacatatggctcaagctccagtcctgcatactggctctgcagcacaacgccttcttttttattggatactgagctggcttccccgtacagagcaaaaacgatcgcatcaaaaatcgttgtttttccggctcccgtatcgcctgtaaccagaaaaagattctggtctgtttttgtaaaatctatgattgttttctgtccgtaggatccaaatgcctgcatggtaagtttctgcggtctcattctacttcacctcctgtactgtgttcagtacgtctctgagaatgtctttttcttcctcatccatatccttcagaaatccacagcacagttcaaaagggtcctgcaattcctgatgttttttccccctgctgtagtctgcttttctctggttttcccggcggatctccagaagatacggaaaagcaagcctcagtctgtcctgcatgtcaataacatcaagatctgccttatctgtaagaattattgtcacataatcctggctcttctgttccagaacctcttcaagacttccttttatcacccgaacctggcgtaagggcataagaggaagaacagtaatctccggcgctttttctttctcttttatttccaccattaggatccctttctgctgtcctgcctcacttacggaacaagccagaggtgttccacagtatcggaaaatttcctctcccaccttcatgggcttatggatatgccccagcgccgcataatcaaactgttccagaatatctgcggaaatctggtcaatattccccacagttcgtatctctgactccattctttccacatcatccgccgcttttcccacaggaagataaaactgatggcttaccagaatatttctctcttttttatttatagcttctctttggatgagcttatgaaccgtctcgtcatatgaaaaattattgccgtttttatctgtccccacgatcatttttaccatggaaggtttcacaaaaggaagaagataaaaattcactttaccataggaatcccacagtacaaccttttcaatatattctccctcacgctgcggaggaagcccgatcatatgcaccttctgcctggaaagcacactgcggaaacagtccactctcggaccgctgtcatggtttccactgacagccataacagtcatttccggcgctgcctcagtcagctgtcccataaaagaatcaaatacctgtaccgcctccgcggccgggactgccttatcataaatatccccggcaatgaccagtgcatccggtttctgctcctttaccctgtctacaatctgccggaaaatatattcctgatcctctctcaaatcccggttcatcagttttaaaccaatatgtaaatctgacaaatgaaaaattttcatatagcctccttgcttataaccgccaattcctgttgccagtagtgtcactgtctgtttttacagctttatatacaaaatcctccggttctgtctccacagagccgaaggatttctcatttatttttgttttactacagttatttactgcagacttctgttttttccccggctgtattcccctcctgtatccaggcttcgcctgtttcagatctgatccggcagtatattttttattattacaatactgagatcatcctctgttatcccggtatcctcagaatgaagaacctgatacagctccatgcagatactttttattactaaaaaggtccctgaatacacggtccttggttgtgtgttttgcaattttcagcaatttttcctcaagctctgccgaggtaaatcctgttttaccttttgtagtggtatgtgtttttatactggttttctccatgcgtaccaccacttatatatatttgtttctttcattgtagcagacgcttacaatactgccaagtaaaaaatttcttaacttctccgttcacagcactccggtcggaataccttgcaaacagcagttcttaacttctgccacaaacaaaaactgctgcaggcttccctcttccggcagattttgctccggaactacaggttgcttgcagcagtcctcatccttatattttttaattatgaaagaatttccaggcagttacatcgctcccagaatctcccgggcattgcggatacgttcctctgttggaggcttcactccttccaacggatagggaatacccagcttctcccacttaaaggttcccagaatatgatagggaagaacctctactctctccacatttttaagggttctgataaaatcgaccagtctgtgaagatatgtgtcgttatcacttccgcccggcacaagcacatggcggatccatacaggcttgtccatctccgaaagcttttctgccatggcaaggatatttgtgttggtgcagccggtaagcttcacatgctcttcctcatcaatctgcttgatatccagaagaacaagatctgtatacttcatcagctcctgccatttggaataaaaaggctctttttccgtataagggttggcgctggtatccagtgtggtatgcacgccggcttcctttgccagacggaaaaattctgtaaggaaatcgatctgcagaagaggttcccctccgctgactgtgatcccgcctttatctccccagtaatttttataccgcagcgctttttttaaaagctccgaaggggtgtatgcctgtccttctcccatcttccaggtatccggattatggcagaactgacagcgcatagcacagccgcttaaaaagatcacataccggacgcccgggccgtcaaccgacccgaagctttccagtgagtgaacatatcctttgatctctttgttgtccattcttacatttctgcgtggcaggttctggcaataacgtccagctgctgctctcttgtaaggtcgataaatttaactgcgtatccggaaacacggattgtaaagtttgcatactcttctttttccggatgttccatagcgtcaatcagcttttcttttccaaatacgtttacgttcaggtgatgagctccctgatcaaagtatccgtcaagtacatgaacaagattgtctgtacgctcctcatcactgtgtcccagagcatccgggttgattgtctgagtattggagataccgtcaagagcatcctcatagtcaagctttgcaacagagttcagggaagcaagaagtccgttctgctctgcgccgtaggacgggttagcgccaggagccagaggctcgcctgcttttcttccgtccggaagagatcctgtagctttaccataaacaacattggatgtaatggtaaggatggatgtggtaggtttggaatcacggtaggtatgaatgtgtttcagctttccgaggaaagtagacagaagatttgttgcgatctcgtctgctctgtcgtcatcgttaccatagcgtgggaaatctccctcaacaataaagtctgttgtaattccgtcctcatcacggattgcttttacctttgcatatttaattgcagacagggaatctactacatgagagaaacctgcgataccggttgcaaaggaacggtcaacctttgtatcgatcagagccatctctgctgcttcatagtagtatttgtcatgcatatagtggatcatgttcagtgttccaacatacagatgagccagccagtccatcatctgatcgtatttctgaactacctcgtcatagtcaagatactcagaagtgatcggctgatactgaggtcctacctgctgttttgtcttctcgtcaacaccgccgttgatggcataaagaagacatttcgcaaggtttgcacgagcgccgaagaactggatctctttacctgtctctgtagcagatacacagcagcagatgctgtagtcatcgccccataccggacgcattacatcgtcattctcatactgaatggaacttgttgtaacagaaatatttgcagcatatttcttaaagttctcaggcagtctggaggaataaagaacagtaaggttcggttccggagccggtcccatatcctccagtgtatgaaggaaacggaaatcactctttgttaccatatggcgtccgtcaatacccatacctgccacttccagggttgcccataccgggtctccggaaaacagctggttgtaagaaggaatacgggcaaattttaccatacggaatttcataaccatatggtcaacaagctcctgagcctctttctctgtaaggattcctctctgaaggtctctctcaatataaatatcaaggaaagtggagatacgtccaacactcattgcagctccgttctgagtcttgatagctgcaaggtatccgaaatacagccactggaatgcttctcttgcatcctttgcaggctgagaaatatcaaagccgtaggcctgagccatagctttcattccctgaagagcgcggatctggtcagcgatctcctcacgaagctggaagtcatagcgtctcataccctgacggtcgcttgctgcaaaatccttctgtttgccctcgatcagagcatcgattccgtaaagagccacacgtctgtaatcgcctacaatacgtccgcggccataggtatccggaagacctgtcagaattttgctgtgacgggcagccttcatttccggtgtataaatgtcaaacacaccctggttgtgtgttttaaactcatagttattaaaaatatctttaattttgtcgcttacttcatagccgtaagtttcacatgctttttctgccattttaataccgccgtatggcataaaggcacgtttcagaggtttgtctgtctgaagacctacaacagtttccagatctttcagatcctcgtcaatatatccgggaccatacgcggtaagagatgttacaacctctgtctccatatccagaactccgccctttgcgcgctcttctttctgaagctcctgaagcttgccccagagtttatttgttgcctctgtaggcccttccaggaaagaagcatctccgtcatatggtgtataattcattttaataaagttacgtacgtcaattttttctttccagcgtttaccgttaaaaccttcccactgtgaaaattctttcatgatcagcacctctttcttgtaaatacaggtatcatgtcctgaagcttttttgtacagccaacagaactgtttcgttagttatttcatgtgaacttctgctgttcacaccgacagtttataccgctttgacagctctgtcaattatttaacacatgttttccataaagtacaatccggggctctcagacacctttaaatgcctgaaaatccccggattttacaatgctttttatattatttgtatattttgatgttggggccagaaccataaaatgttattgaacttttgaccctgacttcattatttctcctccccgcgacggaaaatcagacggaagatcagcctcacaaatggcccacaataaaacatctgataacagattgccatcggaaaattcatggcccaggtacggatccatgttccaaaagagggctccttaaataatacagtagcaatcagactcatgaccgggcacataatacagcagatgcagatggaaatcgcataagtaataaactgcggtctgtctgttggcttcatgatcttaaacgccaacatgccagccagcttactgacaaaaaaaaactccagcacaaaagcaatcggagccatgaataccagctcatgaacagcggcaaggaatgtaaaaccacttacagttccaccggtattcagcgcaacattgtatacgatcattccatacaccatgacaatagccataacagcagtaaaaatcacatcttcaaatttgttttttggcataaaaaaatcctccttataataacgtaaacacttttgattctttgtgttgttcgttatcatccggaggatgtgcgtttccaattttaaccaaatcaaactgggttatattaccatagttcattccctattgcaagcactttttgattctgcattatacgatacctgcggaatttaatcttgcaaagtagaatttactttttcaattgaccgataccttcggattgttccacactgtgcactgccacgatcctgtttttaacatattccttaaaatatcagttccaaaaatctgtctttgtttccagattaatatcctttgctttaaatacaggatttttccctgattttttctgtttgaaataatcctgcatacatcgaagcgccggtttcgcaagaagcacaattaccggcagattaataagcgccatcaggcccataagtacatctgctgtgtcccacactacgctgaaatccatagttgctcccatacatacgatcagagctgctgcgatacggaatatattcataatcagttttttcggtgttttatcacagatgtagcgaagtcccatttctgcataataaaaatttccgatcagtgtagtaaatgcaaataaaaacagagccactgtaataaacacagaaccaacgcttcccagtgaacctgcaacagcctcctgtacataaggcattccggcaattccctcttccggtatcacaccggagcacagaagcataaatcctgttgcactgcagatcacaattgtatcaatataaacagaaagcatctgaacaagtccctgctttacaggatgagacacacccgcagaagctgcggcatttggagcagagcccacaccggcctcgttggaaaacagacctctttttactccctgcatgacggctgaacctgcaaatccgccgaaaattgcagaaatatcaaacgcgcctttaaaaattgatacgatcactcccggaagaagattcagatgcgtgatcacaataaacagagaaaccgctatataaaagattcccattaccgggacaataacctctgtaattttggatatgcgtttgctgccgccaaaaatacaaatgccaaaaataactgcaagaatcagacctataacaagtggtgttgttcctggctgatagaaatcatatctgcggaaagaatctgaaatgttaaaagcagcaaccatgttgaagccacccatataagttacaataagaactgccgcaaacaaaactcccagccatctttttttcagcacagcctgaatatagtatgcagggcctccgtaagagcttccgtcagcagcttttcttttatagatctgcgccagtgtactctcaatgaacgcagatgcgcttcccagaagcgcgatcagccacatccagaacatagctcctgctccgccaatgcaaagagctgtggaaattccggcaatattcccggttcccaccctggacgcagtagaaaccatcagagcctgaaaagaagaaattgatttttcatcatcctttggctccataaccaccttaatggcttctttcagcgctctgaactggacgccttttgttttgacggtgaaatagatcccggcgcctacaagcaggataataagaatatagctgtacatccagttgctcaatgtacctataactttcccatacgcctcaacaattcctgaaaacaattgtcagtacctcctgttttttattgtgcgtaaaacatggatattttaccataaaatcaagggttctgacaagaaaaaagaatgagcagcgccggaaatcatgtcgcataaacaataagcctggccacccattctcaattataaaatttcagatattttgttatttcccgataatcagatcataactttctgcaatcattcgttttatgtcctgatccggaatacttccgtccaggatcacagtattccaatgttctttattctgatgatatccgggaatcacggaattgtaagtatttctccagaaatctctccattctggatccaccttgacattaatccgcatctgcccctggtactcgtacgtccagagaaaagcttttttatttttcttataccttacaagtatccagttaggatcatgaaacggcgcatcctgatacacctcgggaaatgtcattccatattttaaaatttcttcccgtgttgtcatccctgaaaaatcttccatttggaccacctatctgtttatttccatcccacagggcagcgcctccccagctgccatgcggtctcctgtaactgtctcatacagccggaacccgccggaaaaattcctgcagtcaaagccttcctgagccagaatccggtatgcaatatagcttctcagcccgctctggcagatgatgtaaaccgttttatttttatccagctcagaaatcctgtcacgaagctcatctaccggaatattgataaatccttcaatatgtcctcttgcatactctcccggggttcttgcatccagaagaatcacgcttccgtcccttggaagattttccacatcctctgtaaaaaactgcttcagtcttccctctgcaatattctcgatcataaagcctgccatgtttacaggatctttcgcggaagaatacggaggcgcgtaagacagatccagttccttcagctgaagagctgtgatgcctgcatacatggcagttgcaagcacatcaatcctcttatccacaccgtcatagcctatgatctgcgcacccagcagcttatatgttttcttctcaaaaatcaccttcatggtcatgacttttccgcccggatagtaggaggcatggctggcaggggacagataaaccttatcatagtcaattcctgtctgtttggcagtgcgctcgttaattccggcggaagctgcggtcatgtcaaaaactttgatcactgaagatcccagtgaaccgggatagcggctgtctcctccacagatattgtctgctgcaatgcggccctgcttatttgccggacctgcaagggatatcagagctttttctcctgtaatgtaatgccttacttccacagcatcgcctgctgcaaaaatatccggcgctgaggtttccatacgatcgtttaccacaatgcttcctttgataccaagctccagtcccgcctcttttgcaaggtgagaatccggcgcaacgccgatcgcaaggattaccatatctgcctccagaggctgctcgtccttcagaagcacgcgggttcctttctcgcccttttcaaagccttccaccgtatgtccaagcatcagcttcacacccctgcttctcatttttgcatgtacaaaagctgccatatctccgtcaagaggattcataagctgctttggtctctgaactatggtaacgtccagtcccagctcccgaagattttccgcaagctccaggccaatatatccgcctccggcaagcactgccgactttggctgatttttctccacaaactcccggattttcagagtatcttctactgtacgaagggtaaaaagattgtccagatctgttccgggaagcttcggccataccggttttgctccagtggaaatgagaagtttatcatagacctcctcaaagctttcccctgtattcagattttttactgcaactgtttttctctcaggaaaaatccctgtcacctcatgccgcaccttcatggtgatctggaagcgcttccagaaactttccggagtctgaagagtcagttcttccttattctggatcacaccgccaatatagtagggaagtccgcagtttgcataggaaacataacctgacttctcaaaaacaataatctctgccttttcgtccagccttctgattcttgctgctgcagtggctcctcctgcaacgcctccgatgataacaaccttcattttatctttccacctttccccggtagctgttaatacctccaagatttgtaacctttgcatatcccatttgctgaagctgcgccactgccatacggcttcttgctccgcttaaacaatatacaaaaagcggcgcggccttatcgatcagcctttccaccttctgaatttcctgaagaggaatattccagcttcccggaactcttccctccagatattcctcctgagttcttacatcaagaagaactgcatcctttgtgtttttgtaagtctcaattccttcattaaaatccggtcctttaaagaaatcaaataatcccattctgtttcctccatctttcctgcaataatttatctaatctgcctttcagcctgctcatctgtttatactgatacgtttttactcttatattgctccggtcaggttcgcgccattccatccacgcttaacactacgcctgtaatataagaggcctcatccgatgcaagaaacacaaatgcattggcaatatcttccggctgtcccagccttcgaaggggaatctgtgcgatcataggctcgatcacgctctttggcacagccttcatcatatctgtttccgtaattcccggcgccactgcattgacgcgaattccctttggaccaagctcccttgccagagaaaccgtcagtccgttcactgcaaatttagaagccggataagcgatcccgcttggctgtccgtaaagactgaccatagatgaagtactcagaattacaccgctgcctcttgcaatcatacactcagaagcagctctggtggcattaaacacaccttttacattcagatccattactttgtcaaaggcttcctctgtatactccacaaaaggagtgctctctgatactcctgcattattcacaagaatatctacacatccatatttcgcagttgcttccctgaattcgtttctcacactttccagactgctgagatcagggctgatgcctgccacagtcctgtccggatatttttccttcagactttccactgctttatctgctgactcctgagaacttgccgccagaatgactgtcgctccttctctcagaaatgcatctgctgtggcatatccgattcctctgcttccgcctgtgataattgctactttatcttttaacctcatataggatacctccctgttgtttatgtctgtatcatactcttttggaaatatcctgtctgtgataatgtcaccattggtttcaggatgtatcaggaggcttttataataatacaatatttttaaataaccaactgaaacagcaataccatcagaggcattgtaagtactgccgccagagtcgtcatcacaccgattgcacttgcatactccgaatcattcccataaatctggctcatctgtgtcaccgtagatgctgccggtgttgttactgcaagaaatactatcaacagaatctgccgcccttctgcatgagttccaaccagcctgctgatcttcagaatcaaaagagaaaataccggtacagcaatcagtctcaggcctgttaccagataggctctctgattcgtaaatatttttttcagatcagcgcctgccatcagcattccaattacaaacatgcttgccgggcctaccataccagatactgattcaaaggtttctgtcagtaatttcggaagatgaatattcataaaaaacagaataaccgcaatcataactacaataatattgatgtttgtaaaaatcttttttaaatcaattcttttttccctgcttaattcttttttgcagtgtgtccagaaaaaaacaatttgaatactcatatatacgcaggcatataggacccattcctctcccagaataaacgtcaccagaggaatgatcaggttgccggcattggaataataaacagatgtcctttccacttcattcagcttcaggagtctccccaataaatttactgcaggaagcgttacaagcataagcagcagagatgttacaaatgcaagaaaaagtccgctggccttttcggaagaatattctacctgaaatgcattcataataacgcagggaacgatcagatagagaaccatggcagaaaataccctgctgtcttctgattttaaaatacccaccttcacaatcatatatcccataaaaatcataatgaataattttataatctgctgcatcaataataaactgagttccatgtgctctcccttctgataaagtctgatttccaggccagtgtctctcttttattttataatagcttatttaaaatgtaaaagctttttctttatatgaaaactgacactatatgacatcacatttatatatttcaagtatctcttttcaataaccgacacaacaggaatatcccaaccaaatcaccactccatacctttgcgttcccagctatgtgcatctgaggagactgcgtacctgctgatttatgatcaggcacatgatataaatatttttacagtataatacaataacccctatccattccggataggggttattctcctacaaactcactgtttgttattcttttcctccagaagcttttttaaacgctgaatttccgcttcggctgcttctgttttctttcgttccatggcaatgccctgttcaattccccgctgaatcagcttatctgattccagttccaatacctttccgcccatcacatcaccaaatcctttccttactttttctttgtctctgaacacataatctgcgatccggatgaccagctcaaccgtttgtaaccggcctccctcctttatcatatcacaggattgattattacccttttattataaacgaatcatgggaatttataaagcaaaaacgtaactgtccacacagcagcaaaccgtgtaaacagttacgtaaaaacaactctttttcctctttgtatttctatcttctacgacactctcccattttccatttcatacattacatccgccacattcatggtagatttcctgtgtgaaacaagaacaacagtctttttatctgcctcttcacgaagtgattttaatataatgccttcattcagtgaatccaggtttgaggttggctcgtccataaggataaaaggcgcgtcatggagaaaggctctggctattcctatcctctgtttttctcctccggaaagtgtgtcgcccagctctcccacctctgtatcatagcctttgggaaggctcataataaaatcatgaaccgacgctttttttgcagcttccataatttcctgtctggaggcgccgggttttcccactgcaatattgtttgctatggaatcatgaaataaatgtgtttcctgtgttacatagctttccgtatctctcaggctgcgtgtaggaatcctgcgcacattggctccgtttacagaaacctcacctgaatctgcatcccagaacctcatcagaagcttcagaagtgtagatttaccacttccactggctccatgtattcccacaattttaccggccggaattttaacagaataattcctgagaatttcttcttcctcataggaaaaggttacatgggatgcttctgccccggcaaatagcatctgtgcagagcccttatggaaagtgttttcctgttctttccccaattcatgaaggtccttttctccctcataaatttcttctacctgaggtttttcttccagaacggacagtacccgttctccacttgccagcgtctgattcagattactggacaggtttgaaagcgctatcaccgggccaaaggagcccatcatggctatggtacagataaccactccgtcaagatctaccgtctgttttccataaagatacaacataaaaaacaacattccaaaggatgccagaagaatcaccagatttgtgacagatctctgcccaccctccatgcggcttagttttttctgttttttaatcagctccgcagacttttcttccatctgcctttcacgatttttaccctgaccatactgtattgtctcatccagtcctctgagagaatccagcacatagctgttcagctcaccgaatttcgcgcggaactccattccggtatttccccctctgctcccgttccacagaggaataaaaatacccacaatcagataagcgcacagcgcaaaaatccctgctcccacatgatagcttcccataaaaaataccatcataaaagaggtaagagctgcaatggctgcaggtgaaatggtatgagcataaaagacttccagaagctcaatatctgtggtaataatagaaatcagatttcccttatcccgtccttcaagctttgccggacaaagccttcgcagtgccgcaaatactttatgacggataattgccagcagcttaaatgcaataaaatgattgcagtactgttccgcataatgaaggattccacgggcaacagccagaacaatcattaaaacaaaaagattctgtggcgtcattcccgcaaaaagcccctggctcattgctccctgagtgcctgctgcatggcctagcccctgaataagtatctgccctgcaagtattgtaagaaaaatcgcgcaaagatacccggcagttcccagaaggactgccagaatcataatgtggatcagaggctttaccagaccgatcaggcttcccataatcttcagtgcgcttctgcgcctgtccggcaggacccttttttctgatatatcatagccagtattcatactcttttctatcatctgcctttctgcaaaaagactcaacaaggtcataaaaccttctttatcccttcacttttaatttttatcctttgattctttggtaaagaattgtttctctttccggtctgcgcccattacttcagaatttcctctcctgggattgctgtaattttcaagctccatctgtcccttataaagtttcccataagttccgtcaagagccagaagttctttatgttttccctgttcacatatttttccgtccttcatcatatagatacagtctgaatccactacatttgcaagcctgtgggaaatcaggaggactgttttagtctgtgaaagctggcgtattactttcataataagctcttcactttctgcatcaatattgctggtcgcttcgtcaaaaacatacaccggcgagtcatgaagcaacgctctggcaagagccagtctctgacgctggcctccggaaaggttctccgcctgctccagaagctctgttttcactcccttttgtccgtccagaaatcccagaagatttactctggcaagaacctccctcatctccgattccttggcatccggttttgccatacggagattttcctctacagttcccttaaaaagataactgttatggcggatcagagtaacatttttcatcagggcttcctcggaaatctcttccagggcagttccattcacagtaacagaaccggaaaatccctgatttctccctgccagaatacctgcgatagtactttttccacatccggattctcccacaagggatataaacgctcctgccggcatatcaagatcaatcccttccaggatttccctgtccttttcataagaaaaatgcacgttccggaactgtattttcatctttttacctgttatttcttcctggtttacatcttttatagcttctgaagcatgtaagctttcttcctttaatcgaaagttcgcattccttttctgaccttcagctttatctcctgaactctggctgatctttgtttccggaatatccagaatggcaaaaatcttatcgctggcagccattccgttcattgcaatgtggaaaaatgaccccagaagtctcagaggaataaaaaattctgatgccagaagaataattgtcagggctccggcaaagcttaatgtgcctgccagaaattcagatgctgccacgatcattccagccgcagcgcctccgtaggccacgatatccatcacacttgtggaatttagctgcatagtcagaaccttcatagtaatcctgcgaaatatctgagcctctttatccatttcttttgctttcatctcatctgcctgataaattttaagagtggtcattccctgaagattttccagaaacgaatctccaagtcctgtataaatactccaatatcggttcaaaagtctttttgcaagcttttgtactgccacaatagaaaccggaatcagaggcacacagatcaaaagtaccgcgcttgcccgaaggcttatgtgcatcagcacaaaaaatagtgtcagaggcgccaggaggctgtaaaaaagctgaggcagatactttccaaaataaatttcaagctgttccactccctctgtacacacctgcatcacctctgaggttgaaacctgttcatgataggaagctcccagactgagcattttccggtaaatccttttgcgaagaacctgctttacatccacgcttgcctgacaggatgcccgggctgccagtttttcgcagataaaacggactgccacacagattgtcagcacaataagtgtctggcccatataaaggccatttgtattctgtccctgtataaaaaacatttcttcttttttactttccagaagaattgctgcctgccccagaagtcctgcaatggaaaaaactgctcctatctgtgcaagaagtgaaatccactgccagaatatgttgtatgcaatatacttttttgcatgggacaaaagtcctgtaagccttgtgtcgatcattctgtatgtctcctttttctattatcaaaaatgctctgtgctcttcagtcttttactttcttcaaagcctgttttttactgctttgtctctgtgggaatcgttctgatcctcataaaaaagtaaaaaacatgaaatacccacactgctgccagacagattcttcctgcaggcacatccttcatcataagaaagccaattgccataattccggaaaccattcccatgatccttagttttgttctcatagtcatagccctttctctgacaaaactgtccagattctttttatacagagtggttccgataaaccagccatgaagcttcctggagctttttgcaaaacagaaaacagttgccatataaaaaggcacagttggcagaaaaggtagcaaaactcctgcggttcccagtcccaaacataaaaaacctgccattatccagaatatttttattgatttcttcatataccagacctttccgccgcttttctgtacacagtgcagctgttctcctacaagacaatccctctgtctttcatactgcatttttttacagttgtcccggctgttttcaatcattatttagtaagtctaatctaacttaaatatgtataccacaactaactgtaagttgtcaacaacttttatattgctaaccataactgagcaaatacaaaattttcacaatggaatctttgatatgcggataccaaaaagccttaaactctggctatgcatctcataaaaacaaaagagacatctcaattacgaaatgtctctttgtcgctgctgtatcaatgattatctcagatattctgccagcacataaactctggcttttgtcagttccgatccctttaaattttccagcataggctgcatgcttccgcctgctgcctcacggcctgccgctgccacagctgcctccttttcttcaatccaggcaatctcttcatctgtaagctgctccattgtgtctgctggaagaatagcctttagtcttccccagatagaattcagctcatcatcccaaagtctataaagctctcctgacaagatattaatatcctcctgagtcagagcactgtctatcctgccctgaagctctgctgcctttgattctgtttctgccagctcggcatcaatatctgaagtctcctccgtcaccagagccgagccttcttttactgcgctggaaaagccctgctgggcagcctcattataaagtccgataaatggcaatgaagtttcctgaagatttgccagatccaaatatccaacccagctccggtatccttcgggaagctccgctattggtgctccttctatataaaacagaatattttccgcattatccagaccataaggttcgctgtacatattttttattccctcaataatttcctctgtacccggttcctgttcacactgaagagtctgaagctgagctgaatatgtatactcatttacctgaaccggctctgtaaactgtcctgaaaaattacagacatatcgtgttccgctagggtattcttccccacgacttcccatatctgtgtcatgataatacccctcaaaagttccatcctcattgattgtcagaactgttgaccacgcaccggccccactgcaaaacaaaaactcccgatttgccacatcctcataggaaaatcctccatctgccagtaccgtatctgtctgtgttacagatatcagccctgcggcgcagataagtgctgccagtcctgctgttttctttctcatactctctttcctcctgtttttcatttatgataaatttttatttagtacagaaatatttccgtgtcccctttcacctcattcttcctgtcccaaatcagatgatccgaaaatatctgttctattcacacagactcttactgtacttccgtatttctttgtctctgatgcaatttatcgctgtactttcagcattatttttacgaaagctataaattcacctttttattgaatccctgcctgctatcctgattatatcagcattgtcatactttttctaccgtgaaacccaactgattatacattcatgtgccgttatataaaaatgctgcttactccgttcccggaaatctggtcagaatccctttccattcatcttcggctatgtcattttatcctgtatatcccgtttttttgcatatatgcccgaacacctggcagaataatatcccgtggacaataaataatattctcctgtttttacagtggtgttatacgccgggaaatgatacaataaacctaataaaaccaataaggagtccggctatggattttacaaaagcagctcacgtttttcaggaatatttaaaagattatgatcagaataacgataaagtccgtctgaagatcgtccatacttatggtgtggtaaagcaggcggaagaggtatgccgccggagaaatctggatgaagaaactgtatcccttgccaaaatcattgctcttctccatgatatcggacggtttgagcagttaaaacaatttgacagttttgagccaacaaccatggatcatgccgcctatggcgtgcagattttatttgaggaaggaatgatccgtcgttttatgccggatgatcgctgggatgaaatcattcgcactgccattgcaaaacacagtgattttgttctggaaggagtttctgatccctgtgcgcttttccatgcccggcttatccgcgacgcagataaactggacaacttccgggtaaagcttgaagatgatctgctcacctttatgggaatgcccggcgaagagattggagcccttgaaatctccccaaaggtttatgaaacagtattccgcagcagcaccattctgtccgctgaccggatcacaaaaatggattactgggtatcctatctggttcatatctttgacctgaactttaaggaaagcatggacattgttgcggaaaacaattatattgaaaaactggttcacagaatcccgtataccaatcctgtcactgcccgtcagatgcaggaaatccaaaagcatgcgcaggaatatataaaaaaatttaaaggggtgtaaacacccctttaaaattcctgtcattctgataatactttctgtttttattctgctttcggatatttattacaaaagagacagtatgtcggctcgtcttcctcaatttccgggaatcttccgaaaagaaatgtttacttcttatacttccattttcctgccaaaacagatactcctactatcaaaattgtgtatataattgaatctcctaaaactgtaattcgcagagccatactcaccgcaagtaagctgctgtacccaaaaactaattgtcttgacctttttctgtaatacctgctgtctgcctttaatagaggatgtatcggattatctgcaggagaaaacaaggcgatcacacaaatgaagcatatataaatcacaagtatactatctggtgaaaatacattgatctttcttactagcattgcaatattcacgattcctacagaaatcatacagcattttatttctgtatcagcatgataaccgcctgcatatgggcgcaaaaaatatatttctaaaaagaccaagatactaaaacaaaattcgtgccataaaacaccggatattgcaattgcaaaaaaatttaatagtatccaaaaaaactgatttaaaccatactgaataatctccttttcgttctgattttcacatatttgatttgatattgtcctactccattcacttatcattcatttttctcccccaaaatgtcacgcctttaaaagttcctagcccaatatcctccattaaaaactctgtttttcatattttacagattaccccgtcttccatttcataaacctcatcgcaaagaacatcaatatcttcccgattatgactggccagaataatcagtttattttcttctttcatttttaacagaagctccctgatctctctcactccatttttatccaagccattcataggttcatccagaatcaaaattcccggatcttccataatggcctgcgcaatggcaagtctctggcgcatgcccagtgaatattttccaacaggacgcttcaatgtgggatccaaaccgacttttctgagaacagaataaagatattctttgttctttttgttgcgcaaagtataaagaaattccagattatgatatccactccatgtccgcaaaaaagccggttcctcaataataatccccgcatcggtcagcatatccttatctttccccataaccttaccattgacagttatggttccttcatcgcaggaaagaaaaccacaaatagatttaaacaaaacagtctttccagaaccattatgtccaacaagtccataaattttgccactctgacaggaaagagaaacatccctcaaaactttgttatctttaaaacttttacttacatgagatacttcgatcgcataattctgtctgtccatatattttcctctgtacaagttataataataaaaattcagtcttctttgctaaataaaaactccacattatttacacgccatattatcaatatgctgaatattaaaatcccaatacataatgcgcatacaatataagtcagtgaaggtcgtgtataataattatacatttttgtccctatattagttgtttgtatccagctgaccggagcaaatgcagatatcttttgaatcattgcaggatttgcattatgaacaagataaaccatactgatcattgctaccgccgctgctattgcccagtagcgattcaatattaaacaaattgcgaacataaaaacacctgtaaatgcaattacgaaagtaccaataaacaatgtcaaaatagtcagttcctgtggtgaatacttttgtatagcggaatatggcacttcaaataaaaacccataatgtgcagatgcatttgtcaaagcaacggtatgcaacagttttccccattccagtttccattcacaatgtctgatgatccacagtatactgacagataaatgaaaaaacatcaaaaataatgactgaaaaataattgatacaatctgcccgattgcccatctttttctccctatacgcactatttgatacatgtaataatgttgcataaaaggtacgtctgaaaacatgtatactacccctagcataaataaaaaaataaaatatatattagaaaacagaaatggcaacagccatggtgttgatggatatttcacgtcctgcgaaaatttaatcactggctgaacataaatataaaggatataagtttctaaaatcaaaagtgtatacattctgctctgccggagtttctgtaaaaaaatttgaattgaataatgtagttgtttcatgcttttatatccttttctttaatctgatataacttattccacatagagccatagtcgtacaaagactcagccccagcgcccacagaaacatttttctatcgtctccaaacatttgatacctggcatcaaaaacgctttgaatactccacatactgtttttttctgtaagttttgcagaaaactcagtaattgcctggtaacaaaatacaggaacggacagaaccagtaaacgattggttatgtataaagaagcaaatgctgctgcttgtgaaaggcttcctgccagcatcccccattgtaatccgtacgagacaagccataatacatatctgttttctttaatcagccaggcatatccccctgatgctgccaactctttacaaatctgaacgtccgcccatggcatatgcaaagaacaaagaatgccaaacactccacatcctgctgccataaccactactgaggataaaaatattgttgctgctttagaaattacataatgtttcaatccaccgcgtattacagaataacgaatatacccgttttccaattcatcactataaactgttccataggaaaacgcacaaaatacaaacgcaagtaagaatcctaccccatatgtcccatataaaaaattagaaataactgttgtctgtatatttccactgattgaaaaaaataatgcaaccgttacccctattatccccatgtaggtttctttctttataaatactcttcctatatctgttaaaaaatatcctctgcctcggtttgattttatcaaacaaccacttcctctcctgtctgcgcatccagaaatgtatatagtgtggtttcgtactcattttctgtttcactatctgtacctttttcgtgaatttcaaataaccataccggacgtaattcataatcttccacacctattgcgacaggcatataatataacttcgcacggtttacataataagatgcagatgtcagtagattcccatatttatccgatatcttttctgctaatttatcaaattccagcaaactcacttttccccccgattcagtaatactatataccttatttacatataatccctccactcctctggaagaatacaccgcctgaacaggtctgtttgtaactccatcatctggaaacgtctgatttccataataaattggcagcccttcatatacctgttctgcaaaaaaataataacagtcgtcttctttattccattcccgtggttcacttatagaattatcgcctgccttgtctgctataatttcctgttgctgcatagtctctgcatccagggcataatatttataatttgtttctcctaattcatacccgcatctattgatcatatcaacaatgtactgaaaagcatcctccgaactgatataactaaaattattttcttgactataattgtctgcgttaaaaacgtctgttttttcaacacgaaatacattcaaaatatcatcaaaaaacggagttgtataagttagtatcgtatccaggttcaaggtacttccatcttcaagcgtataataactgatatctattgttttccctttccactcaatacttgatatatctttatcaactattgcaatatcagcagcaatttccgatatagcctgttcagattttggatactgcaatttggcagttcctgtttttatttttgaaaaatcaagtttctctgggacttcaatatttgtttcaaatgtcacaccattctgtttatttatatatttttctggaaaaatattctcagatgccataaccatattttgtgatattaatggcataaacaaacacacataaagaacagccataaaaatttttttataattcattgcacaacctcccttgttaaaaaaaggaggatatattcctcctttttctgccattgaacggattacggacaataatatccttttacagtcacacgcttactctgagcctctgatttcatataataatattctcctccaggagctgtcatattatattgagcactctgacgtattcctgctgtagtacttaccaaaaacttttgtcccgaataaatatactctttgtccaaattatacgatcttacataaatccctgctttatcagcactaaattcctggcctctaaaataggcaaatgtatctccatcatctgttttcctctctctctttgacaatggatcctgagacccggttccaccaaccgtaacggtaaacggtattgttcctgcatgaactgtggaactactacaaatcaacgttgtagctaaaaccgctgcacataataactttttcatcattcgtccttgcccctttcattcattttatttaattgttttactgtctgtggaagttcaggctgatatcccaagaaaggacaggttgtattggcatctcttacggctatcctctttgctatgtacctcaataccttgttcccatttatagaagttctcttatccattggcttacacctccctttaaagtgattgaattgtaacatacaattattgactttttacatgattgtcaaaattcgcccatgtttttgtcaaaatcagcctctgctttttatatacaaaaaaagagactcatcataagtctcttagtttttgatctgcgacatatacaaaagaacctgaacgcaaaatctatcagatgtataatctgttttaatttctccaccattggcaagaaccactttttttacattttctaatccgataccatgtattgcaagttctgtctgagttgtctgcagtccatttttcttttcaaggatttttcctgaatagctgttttctataaagattaataacacctcctgttttatttgcatttttatggtcaacaacttttcctccgacttactggcttctcttactgcattgtctactaggtttcccaaaataacacaaatattaaaattattgaaatatagatcttccggaatatttatctgaacatctacctgattcagcgtactgtttgctttctgcagcatgtaattcaatactccgtctatttcccggtttcctgtagttgaatattcttttggatttagcataaattccttcatactgcttaaatattttatcatgtcgttattattattttttttagccattgcagataattcaatgatatgatgtttgatatcatgtctcaatgctttcacccgctcttctgattctctggctacatctaactgataagaataaacttccagcatctgtttaaatacctgctcattcatacgtgcagaataaaatttaagcaatgaatgatacagataaaaaatgagaatattaataaaaagaagtgccagtgctgcaaaaataacatttccttttatttcatgtacagtaataaccagataatatatgtatacaatactgataacaggaaccattaaaagcgcaatcatatttaatgtcggtaatgtaatttcttgttctgattttgttgtcctctggataataatcgcaatcaataataggataaagcttgtgatacattcatacacctgatttaccggctgtcctggcatgtattttgtcaaagataaaatgacaatactgtcaaccaaagcattaatcacgtatatgataaatacagccagacatttttttgttttctttatacggtatggtaaaaagattaaaaaaaggcttgctatgtttgacaggatattcatagccggagagaaaaaaatcaagcttatcacacttgtccatgcccagcctataatgtataaaataaaaatatgattccacttgctctcctctttttgcacaaaaataccaacaaaatatttcaacgcgtaaaaacgcagtgcatttgccagcaacgctataatactattaaatattttcaaactcatcagcagcactctccaaaatctttctccgtacatctgcacgattaattttacttatattcagtacgtctccattcaacatttttacccactcgtatgtaaatccctttacataacttttattcactaaatacgatttatgtattctcagaaaaagattttccggaagtttttcttctatttcatttaatttcccataaaatgtcctgacctcttttttcattacaatattaatttttcttccatcactttgaaaatacaaaatatctttatacaaaatgcaatatgtgctgttttgaacttgaaacttaaattccgcactgttttttcccgatatacgacagatgttgtccaaaacatggtatatcttcgcctgttctatgggctttaccaaaaaatcaaatggacgattttgaaaaagctgtaatgcataattctcttttgaagagatatacaccaaaaatatattctcttcttcaagaacctctcttatatatttgccaaccataactccatctttccctggcagctctatatccagaaaaagaatatttattttctctcttttcaaataatccagcaaaatatcccctgaataaaaaacctctgtcacaaggggaactcttttctctttcgcatattttaatatgatctcttccagctcggaacatgtacttttttcatcatcacagattatagccttcactattttcccttccttttttcagttatatggaagtatatttcgtagtctcttccacattatctttataagtattataacctctcctttttgttgaattcatatctgtcctcctgattatatcaatattgtcatgctttttctaccgtgaagtcaatctgatggtacattcatatgccaacatcctgtctgtaaaattactgtttattttgtccacacttatagtgtggtaaaatcattcgtactgtcattgccagacacagtgattttgttattgaaaaactggttcacagaatcccgtataccaatcctgtcactgcccgtcagatgcaggaaatccaaaagcatgcgcaggaatatataaaaaaatttaaaggggtatgatccacccctttaaatttatgtctgtattctgttttaccggatatcccacacacttctgagcttcaggccttccggttttccacgaaggatctctactgttctgctgtctccgttcagatcaaagtaattatctgacagtaccagatcctcctgttcattgaggatttccacgctttttgcatataccggcgaagataccgtaatctgatttccctccaccttgcagctaagctcaggattttcataccggaaatatttcggataggaaaaaatcacagttccttctgaaatacactttccattttcccaggctttaaagcttacatactgagtaaatacatcaatttccggcagctcctctttaggaagccatacactttccagagccggaacctgaatcattgcctgctcttctcttagaatctccgacgccgcatttctcacataccacttcaccagaatttctttatctcctaaggtttcattggtgacgttcagatgaatggacttttcaaactgaaaatgctgacggttcatattcgcctcctgggtcagccagctctcttcctgacaggagatcattaccggggcaaaaaatctttttgcgtaataatgaagcgctttccagcggccggtgtagtcaatggaggaccaggaaattacaggccagcagtcattcagctgccagtatactgctcccatacatcttcctctgtttcttctgaaatgctccactccatagcggatagcgtctgcctgaagaagctgggaagcatagatcaccgtatcgaaatctccgggataccggtaggtctgctgcatgtaattcatgatctttccgtttgcgccgtaattcctctgatgcttttccataatataggaaaacagattccagtcatccggatcatcgctaaatgtctcaatagtctttttggaaggaagagcctgaaaaccaaactcggatgcatagcggaaaaagtgcttcctgtactcagaaaacggacggtttccatgccataccttccagtaatgaacatcgcctctgtccggatcattgggattgtcaaaggaacctccggaggacgggcttgccggccagtaaaaggtttccggatcatattctcctaaaacctcgggaataatcctctcatacataaaaagataatcccgcacctctgaagcctttgtgacccagcacctttcgtccacaaacatttccatttcattatttccacaccacaggccaagagatgcatggtgacgaagtctttttatattatctgcaaattcttttcggatatttgcctcaaattccggcgtaagctcatatacagagcaggcaaacataaaatcctgccacactaccagaccaagctcatcacagatatcaaagaaccagtcgtccggataaaagcctccgccccatacacggatcacattaaagttcgcaagcttacagtcttccagaagctttcttgtcttttcttcacttcttcttcccagaagatgctcttccggaatataatcagcacccatggcaaaaaaagcttttccattgacctcatgggcaaagctttccccatactggtccttttggcgctgcatagtcatagtcctaagaccgatccgctttttccaggtgtcttccacatttccttcatacaaaagctgcacctgtacctgataaagaggctgatttccaagtccgttaggccaccacagctgcggattttcaataaccagctgaccctctccctgaggagaaagaactgtttcatatttctgtccgtcaggagctgttaccagaaccctccactggtattctcccggcatttctctgatacagtctcctttaaacttcagagtacagttattttcctcatgctgctgtctgatataaacactgtcaatccttccatgagaaacgctgcacagaaaaaccggacggaaaattccggcatccggaagatgcgctccccagtcccagccaaacatgtaatgggcctttcgaagatgcatgaacccttcatatgtatcgtcatttccgatatttccatattttttgtaggcctctgcaataaatttcaaaggagaatggaatactaccttcagagtattttccccggacaaaagaatgtcctttacagaatattcccatatgcggtgcatgctttccgcatttccaagatgcacattattcagataaatgtccgcaacggtatccagtccctcaaatctcagaaatacgctggaaagctctgatgtttcctctccctgaaaagtacactgatattcataatccttttccataaggctgcatatggcatcctcattgtccttccagtaaggatcctccatgttcccgtttctcagaagatcggtatatactgtcccgggaactctggcttcctgccactgtgaatcctccacacagcgcatggtccaattctggtttaattctcttgctctcatagtgtcctctggttctttttattctgctttcgaatattcattacaaagaaggcggtatgcaggctcgtcctcttcaatttccgggaatcttccgataggctcatagaaacgattgtcgttttcgtcatcattacacatggaaacctcgccaagaagcactgcccctgttccttcttccacatggaagtcatgatacatgtaaggataaacagtaatgctctctcccggtgtcaggcggatctgtgttcctgccttcactgtaaattctcttccgtcacaatttacagtaacgtctgtgtctgcaaactgtccgtcctctgtggaattataaacagtgatcagaacgtttccgccaccgcggttaatgatgtcttccattttgttccagtggaaatgcataggagccatctgtccttcgtttaccataagaagcttttctgcataagtctttgtatacttatccattttaaggtttccatttcttaaagtaatcagtgcaaatcctacttcatcgaattttccaaggccataatctgtaatatcccagcccagcatattgtctctgatctcatcatattcatgacctttttcattccagtcctccggtgtccatttgcaaaaaggaggaagctgaaatccgtgatcctttatcagcttttccatatctttgattactgcattaatcttacttcttttcatgtcctattactccttttttcctgccagggcctgcgcctcttcttctgtacgtacaagctcttcttcctcaagaattgtaatcacaagcctgttgttttctctggcaaatggtttgattgtgtgaagattgccgttttcttcatgatacgctcttccatatacgctggaatttgcaggctccagacctactacatagtctccggacgccagggatttccattccataaaatacggaagattttttctgttaaaatccagccggattccaaatccggttttttcgttgatcacagcagcaaaagtatttccttctccatcttctgccagttcatgaagaaatacatactccggttcccgatccttcggtgcttccattatacaatatttttctgtaaagggggcggcagcttcatctcttggtgttactttttttgtaggaagaataatttttgttccttcttccagaagcggatagccaacattaaaatgatacaaaagcatcgcgggttcttcccggaagccctgattttctatttcatcctcaataatgatctgctttcccggaaaaatggtggaaatctttcttttcagcaccagattttctccgaaaagctctgcctcccgcatctctccgcatacggaaagatggtattcatctccctcccagcataccttttcgccggtatgctctgccggagttgtacgaattcttccgtgcatgggatattccctgtctccgatgtaaggagcgcagatgttttccagtccgcaggtaaaaatcattcctcccatgatgcttctctgggcttcctgcccgttagtatcatagtggtttcttccctgaagccccggcttggaaagaaagctcatattgattcccttataggaaagctcgctgatatccagccctttatctttcataaccgtaaatcttaaagggccatttttaatctgccagccgttcattccttttgctctgccttcctgataggatatttctcttatttctgcaatctggctcatatggcctacgtgtcggagtatatcctgttttttcattgtctgcgctcctctttcaattaactttttatttttatatgttattatttacttgccttccactcgtcaatctgagactgcatttcctcaataaccttgtctacacctgttgcatcaagcttatcaagcagcttcggaagatattcatccggatctacgcttcctgtgtacagagattttccaaactcatccagaacgtttctgaatccggctacctctgttgccacaggctccagattaaagtcaaatccaaaggatggcgcctccacagattcgtcattaaactccttaaaggttgcccatttgtcaagaggttcattgtccattacataagtgttgaacagacctccctgtacccagtaaggagcagagtaatctttctgtttttccggaatcagttttgccttgtagtcatagatataatctttgccttctgctgcagccttttcctcttcagaaacttcaaccttttcccagtgagttccctcaataccatagttcagcatgtttctcagttcctggtctgtattgatcaggttcagaagctccattgccttttccggatgctcggagtttttgttgatggctgtcagagctccacgggcagaagcattggtgatctgagtatccatgatctgagatgcaactacctcatagccaaggtcttttccccaggtaagctctgcatatggctgtccgtcaccttttgttacaaaacgtttgatcgatttgtcatcagaagctgttgccgcatccttgttaatatatcctgcaagataatactcgcgcatggtctttaaggtagacttcattctctctgtctcaaatacattctttacagtcagtgtgtcatcaccgtattcaattccgataggatcctggatcttgtccatataagtaggagctgtatagtcctttgtcagatacagcggcactacatccggctcgttttcctggataagcttcaggtatggttccaggtcctcaagagtatggatatcctcatatggaatgtcatacttgtctacatattcttttgtaaatacccacatcgggcagtttccgatttccttttcacttggaacaccgtaggtctttcctcctacctttgcagcctcccagaagcgcggatcaatgctgtcatacatttccttgccttcttctttcagaagatcatccagttccaggaaagcgcccttctgtgcgttctggaggtaatcgtttgcccaggagcaggtaaagcacagatcccactggtcgcctgtattgattacaacctgcattttctggttgtagtctccccagcctacttttactacatttaattttacaccgattttgtcagccagatatttatttacttcatcaaataccatgttgtcatctgcctgagcgtctcccacctgataccaggtaagctcaacgatctcttcgccgtttttatttgtttctgctttgtctccgcagcctgtcagcattcctgcagtaagaactgctgctgttccaagggctgccgccttttttatatatccacgtttcatctttataatctcctgttttttattactcttttacagctccgattgtaagtccattgacaaaatatctctggaagaacggataagcaaagataattggcagagtagaaattactacaattgccatttttatagtttccttcggcaggtttgccgctgcctggataccatccacacccatcatggacttgttgcttgccagccagtcaatagagttctgaatctgcatcagaaggaactgaagagggatccagtccttattatcaatatacatcagtgcattaaaccagtcgttccagtagcccagtgtcaggaaaagtccgatggtagccagtcccggcatagccattgggattacgatcctgaaaaacagcttccattcagaggctccgtcgatctttgccgattccaccacggaatcaggaatactggtcttaaaaaatgttcttaacacaataacgttaaaagagttcatacatagaggcaggatcagcgcccatattgtatttttcagcataagtacctttgtcataacaaggtagtttgcgatcataccgccggaaaacagcatgggaactgtaatcacctttgtaaagaaggaacggaaagcataggtctttcttgaaagagcatatgcgtaggttcctgtaagcagaagtcctataagggtacccactactgttaccagaatggtaactccatagcttctcagaatattttctcctgcactgacaatgtattcataagcatacagactccatttttccggtataaaccggtagccgttcatggcaagagcctcttcgtccgtaaacgaaatgataataacaaaaataaacggtatcacactcaaaagagataagatagtaagaatcacattaaacaatacatttgtcgatttttttatcttattgtactcgctctgctggtcttccatatttctgagcagcttctcctgtttgcgctccatccagtactgtttcaattttgaaactgacatacctgcttatctcctttcttagaataatgcattttcgctgtccactttggacacgatcttatttgcgatcatgatcagtacaaatcctacggttgactggaacagcgccgcagccgagctcataccaatctctccgtttgtctgcagtgcccggaatatgtaagtatccagaacgtttgtcaccggataaagaggaccggagtttgttgtggtcaagcatttttgtaacacttgtggctaaaaaaatatcataaatcaattatgctgcattccgtgtttcaaaaggggtgcgataaccattgaaactatggggacgcacatgattgtaggcaacatatgcgaattcctcgacagtctgataaagcgcttcttccgtagtgaattcatacaagtttgtgcactcatttttcaatgtgttgaaataacgctccatcggtgcgttgtcatatgggtaacctgctttgctcatgctttgcgtcacatttaccgattcacagaattcggtaaatgctttcgacgtatattgtgttccctgatcagaatgcaggattatcccttctttgatagatggttgtgatcctaacgcctttttcagcgtgcggacagcaaggtcactggtgatattccggtctgtgatactcgcgatcacgctgcggtcataaagatccaggatcgtgcagttatacctcacctcatggttctttaaaaacagatatgtaaaatccgtacaccatttttgattcggtttttctgcagtaaaatcctgatgaagcatgttatcaaacactttatgcggtttggcatgtccgcaaaccggctttttaggacgtacaatggaaaataatttcatctctgtattcatgtatttatgaatggttgttgggctgtagcgatatccttggcgtgccagataaactgtcatgctccggtatccatccacacctctgtgctcatggtaaatctcccggatttttgcctgtacctctgatttttgggtatcataatccgccttccggtgtttccggtagttataataagcatttgggcagatgtcaagccgcctgagcagccagcgcaagccaaaatagtcatggtatttttcaataaaccgataagcctctaatcgatttcttttgcaaagaatgccgccgctttttttaagaaaagattctcctttcgtgattcttcaagctctttccgaagacggagattctctttcatcaactcagcttcatttggggattctggatttaaaatggcttttgtctggcattcttcgctaaattcagcacaccatttagagatactggcttttgatacaccatactcagcggtgatgcttttgtaagtacgtccttcttccagatggagacggacaattttctttttaaattcaggtgtgtaagtttgtggcataatagttcctcttttctttctgagatgattatatcttattagccactactgttacaactttattatagcactacaggattagtttcaggttagtttctctttcacaaagccttgtgcaaaaaatgtgtctcagattgtgtgccgaaaagtctccagatatttttaaaagatttcacaatttacaagagcaactttatcaaccttgtacactgctttatcctcttttgccaatttctgaaattttgtcaatccaatgccgtaaagttgtgtaccttcctgataacggataaatttcttggctattttcgtcaataattctgtaatcagttgtgtgaactttaaatacctttaaatctgttttggacattctccaaactcttccgctaaaacctgcaccgttctctttcctttatgattgtggtcaacctggccacatattgttttcttattatctcttcgcaacacatcatatttcatcttataagcaaaggctttttcactcggtaaaatatattctctctgaaagttcgattccaccattgccacgactgcttcatcatccttcaacactcggatgatcactggaaccttacgatatcctaattgctttgctgcatattttcttcgatgtccagatatagtcgtgctgtttccaatagacttagttagagccgaatagttttccggagctaccggtgactcatcccatccatttgcaaatgaatggatcacaagtcccatcttaccaagctgcttcatcaggaaatcagaatccgtacatgccagatcaccgatggtatgaattccatacttcgacaaagtcctgttggtagatcttccgacatagagaagatccgatacaggcagtttccagatcagactcttataattctcacgattgaattctgtaatcgcatccggcttcttgtagtcactgccaggctttgcataaatcttattccaggaaatgccctcgctgatcgtaataccaagttcctttttgactctgccactgatctcatttgcaatcttacggccatcacctttcaaggaactactgtcagaaacgtccagccatgcttcatcacagccatacggttcaatcttatccgtatactcgccgtagatttcccgaagcatcgaagagaacttcagatacaaatccattcgaggaggcacaaagatcacatcaggacaagcctgcctgctgatcaaaagcggaatgtatgtccggaaaaacctgtctacatcacgaacagaacgcaaagtatttacagaacctgcttctgccggtaccggcctctttcttgactctgatcagtatgaagaatttgaagtcggtgatgatgtccccgcagcctcagacttcggcatccgcgtttccggcgtcagcatggaaccgatctatgtgaataaacagatcgtatgggttcatcagcaggatcagctggaaaatggcaatatcggaatcttctatctgaacggtaacgcttatattaaaaaatatcagaagaacaaagataatgttcaactgatatctctcaacaaaaaatatgctcctatccagatcaaacctgaaatggagcttcgaaccttcggaaaggtcgtaaaataaacgtaaggctggtgccggcactggaaatcacatccatgacagcatcagccttctcttttttctctcactcataccagaacacatcttccacaggcttatggaaatatctggcgatacgaaacagcacctcataagatgctgtcttctgctttcgctcaattcttccaatcgtgtccgtactggtttacaccagcaaagccagatgatcctgtgtcagtccctcctcagtacgaagctttttttaattcgtctggaacttcatcacactacatcaccatcccgctattttttagtccgtctgctcctaaaatgtagcataaagcaatgtacaaaaatcccgacagctacagcatattttccggttttggcatgcgtccagtccatcccagactccttgcccatattttatagcttttcttctcttccggatcatcaccgttaatcgtctcaaggaattcgcaaaaacctccgacaccaccaacatcatccacaagactcattccatcccaggcaatgcagattggtttttccttacgctgaatctctctcaacttgtccaggaactctccgtctatttgctgaccaaaggcatctacaaacaaaactttctcgggaacgaatccatttttatcatgaagcatatcgccttcttcatccctggcataaacggttttgtcgtaccaggcattggtgcaggtgattttaatctcccacctgtcgccatagtcatatcgataacacaatgcagataatgccgggattggttcaggattatattcaatacacaacatttccaattcacggttcagttcctccatctcccggaaatatggagccatgtcgatcgtcggatttccttctttgtcaaaatgcgttcctgcctcttcaacgatctggttcatacgggctgtcagctgtctgtattttttgataatgtccttacgttttttctcaacttgtttcagggcggcctctttctcctgtttccatgaatcccaatctccttgttcagccggtgtttttagtacagtccaaagcatcgggcgttccagcatttcctcacactgaccttccatgtagacattccacgttctctgatctgttgttttcttctgaatagcaggccaagcctttcggaatctgtctacttcaatctgtgcaggaatgtaatgctctcccacgccttcataggagtatggtccacaatacttggatttcagccaggtcttaaagctttcaccttcctcataatcatcgtcccaatatatatcttcataattctcacttggaaaacgaaaatacataccaacctgacgggtccactcttttaccaatcccccatctgtcatttttttgaattcatcctcatatggaacatagctatgaaggtggctgttttgccatccaaaagctttcatgattgcataatgaagaccatgcagtgtcatattgcccggaacaataaaatctctggtaattccatccttcattcttccgtatcttctaagaactttcttatgctcctctgcgaaatatcccagatccaattccagatgaagctgcattgccataggaatccgcttcatctctgcttcgatcatgtcccagaattcttttttctctttcattaatcgctctttttctgcgtttaattcttcaagaaggcgccgctgctcctgaatatcatcctctttcttttttgaacgtgcttctgtattggtaacctgatttttagctgcctgctgcatccgttctctatattcctcgcttcgaatcgcttcgttgcttctgtcttccccgccatactggccacgggaatagggcatataagactgaacattcttctctgatataacaagctcctctgctatttcagctacacttttgcccagagcaaacaactctgcaacctgattactggttttgctgtgccacagtccctcagtaatcagaactcttcgtactttgatcggatatgtcccaagctcttctgctgtcttctttacagaacccgtctctttataactatcaataatctgctgatataactcatccatatatcaggacctccttcatgtatcttaggtggcctaccttttatttatgatatcagtatacgtcagatcaattaatgtgtcaaccttaccttttagtcgtcaaacaagaaatgcattttcaggttatatgaagaccagaaaatgcatattttaccacattcacattaccagcgctgcaccatgaatttcactctctcctgcacgtcctcactaaaatcagacagatcctcaagaccaatcacctcatcctgaaccaaccgaacgagatcgatcagcatatctgatttgctgacagataaaataacgccaggcgctttgcgatcttttttgatacgctcttccagtgcccagaatcgttcagaacccttcttatcacaggtcagcagctctacatattccttgcataaacgttccatataactttcctgccagccaggaagtttctcacggaacgatttccaatcacgttttgatacttcaaccataatctcacctataaccgatcaataattctcaagcacatcctgcaaatatgccttatattcagacttcacattatccggtcccgtgatcttcattccggatccaataccagttacccaaccaaagaactgcggacttactgataccaaaactctggttttaaagtgatcctctccctgcggaatcaaccatacatcatgtccaaagcgatcgatgataacaccggccagttcattcttgcattccagtgttacttctgcatccacaccgccgtacattccaaaggtcttcttggcaaatgcagccagatcaaagttcttaaaggactcttcccctttacgatctgtctccagaatctccgtattctgcatcttatctacacgataatgcttgataattccagccgctgcatcataagctaccagataataattctcatcatcccaggtcagtgtccacgggctgacaacatagaatgcaccgtctttcttcagtttcagttctttcttaacagtccattctgcataatggaacttaatttccttattctcgtaaattgcagtatgaatgtaatccacattgtaataaacagtttcattctccgtcttcggacggtttacgatgaaaacatatttggaaagcattgcagcatccgtcctgcagcagagcttctctaattttgttatcagttccctggatttcttctccgtgataaacttggaggactgtacagcatccaccaggagctttaactccggcagttcaaaatctctggcaccgatataatagccaggatttttccccttcttctgctgaatatccagtccgaatttctcaaggatctccatctctgtatatatcgttcttcgatccgtacggatgccatattcctgatccagaatcgtgcacaactccgatgcatttaacatgtgttcatcatcggtacgttccagcaggatttccatcagatataacgtacggagcttctgatcaaaagaagccatagcacatcacctcatatattctatcgttttacttattctcataaattccagatttcatatccctgtcgtctggccgaatcatagaccggctgcatgtttttctgcaggatatgatagaattcttcctttgaatttcccggtctgtacaattcctgtcctgcccaaatagagtgcagattatcccgatagcagtcttcaaacagcttatgaaggcctgctcgctcgtggatcagattgtacattccgtactggttttctgcgaacaccgcaaagaacgggtcccattttggaagcttgttactcttcgacgaattcaaagaagaatccatcggcatcagattccaaagctcatcattcatgacaaaagaccatggtataaaatgatcaacatcatactgctttgtgataatcggcttacccgtaaagacatcgcatacttctcttacttccagaatgccttcccaaagtttacgtacgttattcagctttcgcatcttctcatccatcggagccagcttgtagatcaggcccggaacctccggattattattctgcagccattttactttttcgtattgaatccatcccaaaatatttaccatattatcctgaatcatgcgcatccaatccggattgaaatgaacttcctttttcagtttgctgctgtctccaaaggtatacggcagtcgaatcatagtgctgtcgattcttcggatatattcagtcagtctgcggatacttccccacggcacttcttctgagctttttgagaaaaaacctgccaatgcccgaccgggaaccatattggtcagctgtcccttagcaagtttcagatcggcattgtgttctctaatggcattcttaatctctactttagaagcatttgtcggaaggtcactgagttctgtcagtttaagaacagcacgttccagaccatctctcacaaggccgtccgcctggatgccgctaaggtgaatatgaaattctcttacggaataccaggcattgcagatcatttcatcaatgattgcatcaaaggtagtatcctgaatcccctttgaaataatatccacgattgcttccagccagtaaaatttataacagtaggaaggatccttcatcatctgagaaaagctctcaatatccaaggtgttatggtattctccattgatatttaacgtatatccgatttgcggagtatcaaattgagccatttctcatcaccccttcctggtctgacatcgtcagtaatccagtagtcttctatcgtaagttccggaatctctgctatgaattccttaaaggaatcctcagtaaaatctgtaaaataccggccattacacacaccttcaaaattactgtatttgaaggaagtgtagattacgccgatacttttaagcgcatcactcatttttcgaatcaccaaaagcagctcattctttggcaaatgcaaaatagaggagcatgcccatatgccatcataagtgtctatatcatccaattcctgaaacaacatttcttgcacttcaatgccggtaaggtaaaaacactggctcgtctgcaaagctcaactgaaccatcggtcgctgtaacccggcatcctttatccaggaaatatttcgtgtcacggccggaaccgcaaccgaaatcgaggatagcggctccctcattcaacaaatgaaggaatttatcctgagccagatgcatatcaacattctgtgtattctctatgaaactttctgcattaaggttgtagtaatcaattgtctggtccattttcatacttcctttcgctcagtggtaacgattcccacgaaagccaaccaggtcagtcttctcttatattttttctaatttattctcttcgtcaaagtagaccttgtcaccttcgttgatattgcgctcatagagcatggcatcttctgcttttactgtcacctcttcacctgaagaagtcataagtgtgactaccgccatgacaggtgtatcttctgctcgttcttcacatccgaagtccaggtcttcgtcaattcttttaactgcataaatcataaaaagttattccttttttcatatttacgaaaccgcattcttcttagtttctactgtcgcctgcagtctccgatatgtatcagcaggcctttttgcaaaatcgtcaattgatttcttctcaacaatttttccacctttaattgctaaaatatttccgtcactgaatacatactttacatcgccatattcaaatccgatattagcattattttgatttatctcagcagagttaacacttctcttcaactctgaatagaatcgatacttctcttccgattcaatcaaaagttccggaacgaattcgctatgctgcagcaagaacatattcgtataatcgcatggaaaaccatgctctttcggttcaatagtcttatcaagagtttcccaatttcgaacagtaaatcgataatatggttcttccccatttgcatgtgttaaaggtacttccctgatattctttcggcgaacaatagttgttctgaaaacctcaccatagtaacgaatgcctgcatcagtaccaaacttatttttagtctgatacagtgctatattaaagttttacattagatgcagactctttattatcatctctcgcatcaattaatatgatatcttcgcatgacaccaattccagttcatttaatattgcacatattttttcatattctttttctgagaaaaacattattaccttaattgctcgctctgtttctgaggctgctttataaacttccacttgtttagccaagttctgttttaatttcgaatttgatgccagtttaaactcaactaacgtagaatttttctttccgtatgaaattttataatcaacaggcccccgtccattattaacttccctattaacgtctaaagccgacccataccaaaccaatcgatatatcacttgcaaatcggcttcgcgtttaattggtttccctttagcgtaaaataatttatatccatcttgttcttcaatcacatgcttcagataaccgactcttagctttgcttcatcatgcgcatcaggaattctatgataaaactctgttttttcattcaataatgaaactaattgagatatttgatcattaaacaacatctctacttcttctactttttctttactaatggatgtagcttcggcttcattatcttccttatatttcatgtaataatctataagttctggatgttgtttaatcaacctagtagcagtatcatttttttctgtctggcttaattcttttttcttcttatgcaaaacttctcgaaaatatgtctcaagttcaaatcgtaatgcatcgtcagaaatggccggtgcaatttcttgcaaatttcgaatcatatcaattctatttataaaagtatcatctcttgtaagcattgtctttggtgtcagcaacacataatcatctgcatagcatggcaaataatatttctgtgctttccaagaagtagtttcccaattaaagcatactctgcctactgaaaattctttgcactgttccggtctcaaatacatttttgcgaaattctgtgtatattctaatagatattgttttgcaaaattagttgtaaagtcgctaattttatcacgacctactcttggacttattagacaaagtttctccatatggtgaccttttgttattttttctttaccaaaatttttaaatattgaattcaaaccctcatataagctgttcgcaaaatcattccccattccacaaccatcattgccagataggctaaatccaagccaagtttgttttacttcagaaaatgaaaaccatgcctttttcattccagatgtaaatttcgatgctttttcagcctgatcttgcaaaaataacagataatcaatcatttctttgtgtatcttttgaaaatccggattttcactattaaataacaaaaatggatctataaataatggtaggtcatttattaatgatatatttatagcaccatattcctcgataatgtcttcatcgatttcaaaaaaatctgaaaaataaacttttatatttcccaattactattcctttcctcaaaataaaactcgtacttcctctggcaaatatttcgctagttcctctaccaactcatgcacctttgttccaggtgctatctctgccggtgtctttcccttcccattttctataatccgtcttgcatatcgaattgccagctttggatttccatcattcatcagaatttcaaatatgttatccatattcttctcatacttcccaattcctagctcttgaaatttttcatttaaaaattttttatactccgaccgatggttatttgctgtgtaatatgcaaaatgcagcatgaaccaaaattcgatacactcgttactccatgctgcatagtattgaacatccggattcttttgatttaatacttctgcacgctggactactccattgacatcactggccggaaagctgtctttatcataaacacaccatatctgcccttttgcaatcttattcttacgcacatactcttccgcttttccgattactcgcattgtctcagcctggcaaccttcaatttctattaaaaccatatctcgataaataggattatcttcgatataccgtttaaatccttcaaaatacttaggttccgttgcttgtccctcacagaaaatgtaataacggaattctttcttttccagatattcctgtcgacgtttctttttccaattgtctttctcttttctgcctcttttagccattcaccgtcccccaatctataatctttctgagataaggatctgcgccatatttcccttccagatactgtttatcgtacttggcatccttgcgtacagattcacctttcttatttttaaattctacaagagaatataattttgagttctgacggtttccttttgctacaaaccagatttcgtctcttctgaacacttcactattcatggttgacagatcatgtgatgtaaaaatcaactgtgcgccctttttattcttttccatattactgaacgtcataataaggtatttaagtaataccggatgtatctttgcatctaattcgtcaattacaagcgttgttcctctcaataaactttttgcaataaatggaagcaagccaaataatttcttagttccactggattcatcaaacaaattcagctctgcttcaaattcatctactacatgttttgtaaatacttcaatactatcattttccttttcttctacacggaaatctacgatatctaaatccatctcctgaatcatctgaagcatcagtctttttacgtcctctgacttcgaaacggccattcgcaattcctgcataggatttccataattcaagaaatcaatttcctcagcaaaccaatcaagtacatcctgcaccacttcgtttttgctataggtgattccaagatacgataacagcggtaatgtatcggataattcatcactggttttcaatcttgcaaatgcacctttcaaaataatttcattttcatcgcgttcaaaaagtgccgatttccgccctgtttctaattttatacgatctaatctttcgtattcaaccacttcttttttaacagttaattcatatcgatactctgctaattctgttctgaagaacaattcaaattctgttggttcattccttattccttcgtcaaaagcaaacggctctatcacaagctttttcattttcattgcagtctcttcgttattacttgtagcatataatggtcgcaacactttcataaccaggctatgcaacgcttcaagaacgttagattttcctccaccattcggtccgtataccgccgataccggtaaatataattcctcgtctttatcttttataattctgtcttcgtgctcagaaatggcggcagcctgcatgtcaaatgttacctcatcccgtatacttttaaaatttttcactgtaaattggcataacatcttatttacctccatttttcaaaatttcttgcctatatccttattatattctattttttgttttttgcaatgattttatgagatataatctcatatttcatattgtaatttctttttctgttatgtctggtgaattgaaaaattggaattagacagaaattttctgatttacattatcttatcagtcccctcatcatcgagaattagtgataatggtagccaacttggctaccatttcaccacatataacaattaaactcgttctctctattttttctccagggatttggccagggtagataaaagtgctgccatttccggatttgaaaggaccttggctaataattccgcatcaacatccgttggaagctcaacagtcttgccggcagcatgggcatgcatactcggatccagatcttttttctcgtaaaaagcttcttcaaagagctctgcattcttcctgcggtcgtcatcaataatatgagaatacacatccgtaaccatattaatctgtgaatgaccggagtctccctgcacggccttgatatctccgccatttagcttcagcttataagtgacacttgtatgacgaaggctgtgaaacacaaccggtggaagattatgctctttgatcagatcattcagggccttacgaatagaagaagtccctactggcagaccaaacggagttgccatcaccaagttataatccatatattcctctcccagtgtttccttgatcttatcctggcctttcttccattctaccagcatttccgctactgattttggaagaaatactttacggatactgctctctgtcttcggaagtttcagtacacgtacagttttgttctttctgctctcctccggaaataccagaatcacatcttttccatgcagttcctgaatcgctgctttatctaccctttgtacttccttatcgatatagatgaatgcacggccttcctcaatcgcctcatcagagatatcaacgcaatcccaggtgagtccgagcatttctcccatacgcatggaacaggaaaatgccaaatttagtgccagcttcaagcgctcatcctcacaaacttccagtgcatgcatcagcgtttctgctgtccagatctcacgctttgcgctcttgtactttggaacagttgcatagattgccggatttttcggcatcagttcccattttaccgcctgttgaaaacagctccgaagcagtttatggatatcccggatcgttgccggtgacacatactctgactgccgttttccggtggccggattgaccacagccggagttctgagcaatcgctgataatacttttcgataaacctggtattgatattttcaagcttatccccgccaatgatcggaacgatataattattgatcatgctcacatttgaagaatatgtagacaaggcccaggcctcttttccgtataaagtaatatactcctccatcaattcctttacggtcttacaatgaggcacaaccatttgccccacatctgcacgatattcgatttcttttttacgcttcttcgcttcctgcatggtcttataggtttcccatttctgcctgcgctttcctgttttatccttatagctgtaaacaacacaatatcttccatttctttctactaatgatgccatgttaaacctccactttctctctgccttgcagccaaccctcaaactcctgccttggaattcgaatcgttttgctgctttgtactgcttctacttttccttttttaatccatttgtgcacggttgccggattcactcctgccagaactgctgcctcatttactgtcagataaacatcatttcctatattcttgctatgaccatctcgttctagaaccgctcttctataagcttcaatcctgcgattatcttcaccattcactgtctctggcatttcgtccgatacgatatgataatcatcctggttgccataccattcataaaaactcttctttgtcactcgtcttcgaccatcaaactcaatggttttcagaatctctgactgattcagaagaccatatacggtagatctgggaacacctaataagccggccatctccggcatagccatggagctttctacaatgtcacgaactttctcccggtcctcggcatttcggtaccgtttctgacttcgataccatttatcaaatgcttttttcggatatctcctccaatagtccactaagataaattccacaccggcctttttcattttttcataaaccaggttctcagatatctgaagcatctctgcaatatcccgtggtgaataggaacttttcttcagttccagtcctggctcttctcctgtgaccttatggtatttcacctgattggcataccacttttcaaagctttccaactctacacgcattttgccaaggatcacttctgttttgaaaaagttcttgtgcaccagccagtatcggtctgttttcttcagccccagaagtcgtcccatctctggcacggacatatatttcttttccggaggaggctgccttttatatgcgctctggctttctatctctttcaccagttcatggaattcctcttcctttgtcaatggattgtaatacaactgtgacacctcctacattactaacataacgcatctgcagaaaaagcgttaggatgtcatcgtttaaacaaacaaatcatccaaaacgctctttctattgatgctgatccagccactcatcaaagcttttcttggaaatacggtacttgccaccgaccatcacccaactgaatttctttttcttgagcagctcataaatacactgtctgcttacgcccaaaatctcctgcagttctgctactgaataacatctcttgtccatatctgccatctcactttctctacttgtttattcagtttctaaatacaaaaaacacggagaaagtttaggcaaggaaacaaaaaatcataaaaatgttatttatccttccatgtacatgtttcgcatctttctgagaatcgtattaagtctctggctcagtgcaccttttgtgacaccaagaatttctgccacatccttctgtttcatatcatcaaaataaatagatttaatgatgaactgttcctgaaggctaagctttccaagcttctcatgcagcattctactctcttctttcaggatcaccatttcttccatactcatctgtgtatcatctgccatatcggcaatagacaacccatcgctgtttgcactgaaagcgcaatccagaatttcacatctcttggttttacgtttccatttcttatctttctgatccacaggattctctttcttttgtttattttccagatcctgaaaatcttccatctgatcatcttcttctgactccggtgcccacttacggctacgataaatttcatttcgatactcggcaaacattgccattgctacttccttggaaatctcatagaatactccatcaatctttgcataatattttccttcgtatttgtatggatgctgtacgtacatcttcttttcctcctgaatttgaaatcttgttttctgtttcaaatccaggggcggaggtgcacgtgatccgctgatgcatctgatcatgcctgattcccttcccaatcacgcggtcatagacagacccgtggctttggctggaaatcattgattttcaggcatcaaaaaaagccccattgggtgtttaacccaatagagctttgaaaaattttattaagttgtcctgctgatcttttacttccagcataatcattgtatcagtcggaagtatcagaggtatcccaaatacaggctataaagtatcaattacgcttcttggagtatcattatttgagactttgcaaaatagtttctatgataaactttacttgtcattttcccagtctactaatttcataattgcttttaccgcattcactatccttggagcaaagtacgcctttgtaagccttttcttcgaatatgcccatataaaattcttactcgtactttctatcaataaatctgtaaaatatcgttcccaactgacatactctttactgtcaatgtattcttccggattctgaagtactgtttctacatttacttccggtatttcctttgttgaaagtaacagccactcaaaagattctggtgcatagagaacaatgtttccctgtgttttgatacattcactgatgtctttcatctctgaaccaaatgctgctccatctacaatgaccaaaattgtaccctcttcattctggctctgttccaactgtctgatgatatttgatttcccaccagcagaaaaacagttcactcccttctgtctggacatttcattaaaaaattcaaatccagaattggaatcctctgtaattacaattttcggattgatattcttttcttctgatatttcaccatataaatgatagatctcattatatttctgtttcgcatcatgaaattttccagatttgcgaaatccatatacttcatttacactatatggcaatgctggaagtttttctcttgtagccaatacgaagtaattatcagatccctgcacgagctgcgcaaacttctttgaaatgaggaagcggtttccttcatcaataaaaataatgcttcccgttgtttcttctatctgtctttcccaatcctcactatcaattactttacacggacaatcgcaggaaagaaatacgccactgtctgcaccgtatcttccataatcatgtataagatcaattaaaacggtcttaccagatccactgtcaccagtaataactgtaatattcctatgaatcacaaaatcatatttcacttttctggattctacaatgattctatgtgaacctttcataatcactactcctgtttcatttcatttaaatacttatttgctataggaataagttccttcattgaatgagctgtttctcctccattttgaactttgatttcaaattttatgtcttttccaaaactcatcatatgtctgagattaatggtgacatctttaattctgcctatttctaatatccattttgcacagttatcgccacaggtcgaggcattgaaaatccgatctggttcatttaaaatcaacaacaatgttttcactcctcctgacagtctttcaggaggaatctgtcccaacaccggactgttaatgcattcaccacttaatacttctgaatcatcaatatctctaatcatctttttcgccagttctgcctcaagccattctggttcatagctgtttttaaaataaacatttgtattataaatactgtttttcacatctccataaataatactcagcatttataagagcctcctctcaaaatacatttcttcctatgacatggtttcgttccatgtttatgttctccattataaatgattcccggctttttttgaagttttttagcactggtacttttagataaaaattttttcattttaaatagcaaaaagctgttcaattattgaaaataaaaaaacataaaagtataacagatatagaagcaaatgatcatgcctgattcccttcctaatcacgcagtcatagacagacccgtggctttggctggaaatcattgattttcaggcatcaaaaaaagccccattgggtgtttaacccaatagagctttaaataattttattaagttgtcctgctgatcttctacttccagcataatcattgtatcagctggaagtatcaaaggtataccaaatacaggctataaagtatcaattacgtttcttggagtatcattatttgagactttgcaaaccagtactgaaatcatcatacactaaaatcattttttgttaaccgccattatttagacctccttggtgcgcgttttcttgtgattagattgagatcctgtagctgtctgcccatctcgtcgtcctttgcaacaagcagaagatccttatccaggttatttaaagcatgcagaacggcagcatatatacccatagcaactgacggctctcctttttcaaccttccaaagagaggcacgactgatcccggcacgttcagcaaccagttcagcggataaactccgtctgagtctggcaagcttaatctgttctcccattgtctgcaggatttcttctgttcacggtaatatattatattctgctttcttcatctttttacatctccttttagtgtttactattatatacgttatgcactattttgtcgattttagaaagcattatttgttttacaatttgtacgcaatcgtattttattcaaatggtagtcaacttggccaccttttcactacatataacacccaagctcgttctctcgattatgagcatacatgtatactcggatctatatcttttttgcaaatcatatctttcatagccattattaccttaatcgcaacatctaactcctgttcaaatccataagatctctcttcaacgtaaaaaagctaagcccaagtctcagcttggtccctcgtataaggcaaaattagtgtataagatttcgtttgagatgaaattctgtacagttcttttatatgaagaatgatgcgtctcacatgccaccaagaatttgctggaatatgcgatatccagatccataccagtgggatccaatatccgcaaaacagtgctgacctgcactggaatatttaatcgcagagactaagctttcattttttcacctttcagccactgtgccgccgcttccgactctcgtattacccacaaataaaattgtcgaatcaaatcttccgcctttattataggctttacagatttcttcaagcatcgccttgtctttttctggcatagaaatcacatagatccattcatgatgctcttcatcaaatgtgcaacgcacatcatatggcgctgctacagaataattaattggagaatagggaaacattctcataggtgacctccacatacagttgtaaatatttcatatatgccttaagtctataatatattataatacaccgtttcattctctgtcttcggtcggtttactatgaagacatatctggaaagcatttcggcatctggcttacagcagagcttctccaatttctgtatcaattctttggatttcttttctgtaataaattttgaagactgaatcgcatccaccaaaagcttcagctccggcagttcaaaatccctggcaccaatataatagccagggcacttgccttttttctgctggatatccaatccgaatttatcaagaatctccatctctgtataaattgttcttcgatccgtactgatcccatattcctgatccagaatcgtgcacaactccgatgcatttaacatgtgttcatcatcggtacgttccagcaggatttccatcagatataacgtacggagcttctgatcaaatgaagccataacacatcacctcataatttcacataggtcttgcccttcaatgtaattctctttttctacccatattatcttggccaaaaatctaccggcactacctcaaatctatatttctgcttcgcattcggatacttctcccgatccacttcactgcaaaacatgtcgtatggtctggcacatgttttataaggcggatacaatgcctgataaatcaccagcttctcaccattttctgtatgctgcgcaaaagccagaatccggtacaagtactccgctgtttccagatttacattttcccgcttaaaatgctggactacatcaccaatatgaaatctacattcttccatttcgaactagttctccttatccatcgccatatgtatcattttctcgaaggattctctgaaatgctcatcatcctccgatgttcgttttcttggtccttttaagtgattctttccggatgcccttcgtgccttcttattcagatgccgttccataagcatctggtcaatattctcattggtataccatttcccggattgatgaatcgcatacacatcttttccaagtgccattgccgctactccataatcctgtgatacaacaatatcgcctttatgacaaatactgatcagtttataatccactgcatctgcaccggctccaactacaatcacctcactgtaatcagaagacaacacatgatttgtatcacacaacaacgttaccgggacactatgctcttttgcaactttttcaacaataccaactaccgggcaggcatctgcatcaacaaaaatctgcatattctctcctttaattacacctgaatggagtgcgaacctcaataagattaccactcggatcatacagtcttacaagcttctgtccacctgcaagttctgtcagtcctgtggcatatcgaacggaatacttaccagattcatatttcgcaagcaatctatctatatcaaagtcctcgaaatacaattccatcatgttattgaatggcgcagaagtctcattcagcgtcttctcccatacgttggcatcctgcaaaacaagtccctccgataagatcacattaccttcattcttaagaaccacttgcagtccaaataagtctttataaaaccctattgatttttctatatcatccaccacgatcagtacatttttcagcatatccgtcacctcacaatccgcattcagttatattcttatttaattcatgctatccagggacttctgcagcatctttttatatgcattacgtacttccactggaccctcaattactatttttcctgaagatccgaacacccaacgatagaaggttgggctgatgcagaccttaaccgttgtctggaactgttcctcaccaacgctactgatcttaactttcttgccaaacttatctaccacagcgttcatacaacagttgtcacagagcaaggtcacgtcaaccgcttcatctgtagagaacatacgaaagacctctgtcgtatatttggatacattatagcccttcggcttcttaacaaccttctccttcaacagttccggctgtttcttgatacgatctactcgataagtacgaacagcttctctctcatcacagtaaccggtcaggtagtaatagtcgccatcccagattaaatcaaatggactgactgtatatggcttcccatcattcctgagcacttccttcttcttaccattgagttcagaataatagaaggaaatcttcacgccggcattgatagcctcattgattgcatcaacaatataatagcccttttcattctctgacttcacacgaccggtgatatgcacagatctctttagcttatctgcattggtctcactggtcaaagaaatcagcttctcgatcaggctctcactcttcttctccgtaatgaacttggaagactgcactgcatcgatcagaagctttaactccggcacagagaatttgcggtctgccaggtagtattcccaggcacgcttacgttctccgataatctcaaagccagccgcacgaagcaaatcaatatccttaggcacggtggttctatgcacaagaatattgtgctgctccatcatatggtcagtgatctgctctgtagacagggtatgatcctcatcggtctgggtcagaagtatctgatagagatacaggattcgaagtcttgtatcgttgtcctctgcctttggtttaatcactccttctgttttggttgcctgatcagataagatgacatcagcaattacctgcgctgcaagcctagatccaagctcatttggatgacagccatcttcagcaaaatatcctgcttagtcgcttcctcataaaagcacttgcctacatcggcaattaaagcatcgttctgatcagcagcctcatgataagcatcatacatcttctgatacatctcatcataatccatgccgaaagattccagctgcttgccgcccttctgataagcccaggtggcatacagaaccggtactgctccattggaacgaatacgttcacacagcagtgcagtgttgttcaggaagctttccctggaagtaatcggaccgttgctcatctcctgaagaatcacatagtcccatttctcattctccagagccgcctgcgtcattcctcccatcttagtgttgggattcaactgctcggcaaggcgtgctccaccgcgggtatgctggaccacttcggcatctattaagttggccagggtttctggcatgttgtttgcaaaagtaaaactattaccaagcattaacactctcatattcttatacctataattgaacattttctagcataactatctagtataacgaatattaaataattgctatatcaaacggatgccgcttcctcttcactgatttcatccattttatatttccagtgataaatcacaggttcacgatttacttcatcaaaatacctgtaaattcgctcttccaattcctctttggtattgacacggattccacgaagcatctgccgggtcatcttactgaaaaaactttcaatcatgtttaaccatgagccatgtttcggagtaaacacaaatttaaaacgtccctttggcagcgtatccagaaagcgccgtgtttctttggaagtatgcgcggaatgattatccaggatgatccggattgtatcctgtgatggatattttttgtccagtatctttaaaaactcaataaaatcagaactcttgtgagtctcacttactaacgggatggcttctcctgtaagcagatcaatgcctgccagcaaagagagcgttccaagacgtttgtattctgcatcacgatatacctctccgtgttccggtgtcgggcgtaaatccggtgcagtattggagattgcctgaatacccggtttctcatcataggacaccgtaatcgtcaatttataatcgtctggaacaatgagatcaccattctcatcaaactgcatttcaatctgtttgtagaccagcaggacttcatgcatttttgattcaaaatcaggatccctcttttcgcagtaatatttgattttaaagggtttcatatcctgttccctgaggaatttctggatataaggtttcgtaactgttgaaagtcttggatatcccgcctcctctgcatgtttctgaatgtatttatggagagaagccaatgtccacagttcctgcgcataaccgagttctgccggtctctgacacgcaatactgatcatccatgccttcgcatcgtcggtgatttcggatggacgtccaggacgctgaacatcaaacagtgcagcatccacaccgcctttatgaaacttcgaaacacaaaggcgtaccgtggcagtgctgattgcaagtttatcagcaatttcctggaatgtcattccatcggctttatataaaagaatcctggcacgatccacgacttgtgcctgaatggttctcttttttgataatgatttaaggtaattcctgtcttcatctgacagaggaagatatgtttttctcatagcgatcatcctttctttgataacactattttaccatacatcatctcaaaaatatatagcagaaatttaatttattctatgctagtgttccgaatacaatgctactttctctacgtttatcaaacgcttatgtctattgctttatgatacgcatcagatatttcattctttgcctaattattcaaatatacctgatatgttagattttagtatcaagcgttgcctgtgcaggagatttccccgactctgccaattctcttgtaacactatctaatgcaccatctttaattggcttaccaatttcccagttaggatcagccttttttgcggcatcataaaatgcctgtctgtaaattctctcatatttttcaagggtgtacccggcagccaatctgtcctttttctgcattttgcagtacaaattgttatatacctcggaacgttttgttgtatctccattgtggacaccgttttcacgcaggaactctttttttgtcagttcatacatttcttctttgctgctatccggaattgatatgatccgttttctcgaattttcattttcgtctgtcactaaaagccccgccaatccattaacaggattgatataatctccgtccttgtcataatgactcatcagattttttattccctgaatatttccatacatcgcaccgtttccggcagacatcatctgttttacagcggctttgtattgtttgctgtttgtgtcaatcccggcagcttttaactgggactgaacagaactgctgttcaactgagacaactgaaaactgcctattgcatttactcctgatgtcccgaatgatttttgaaataaaaaagcataatctgtaatctttgacataaaacatcctcccatctctattccaaaaaattataacttttccaatgttaataatctgctcagtttctctatttcctttatcggataaaataacctgttctcctagtcccatatcatcaaacgaccatattacgcatacaaagaccatctctttacaagataactaccgccttaaattcattttcatcgcaggaaagcaccatatcaccgccatatttatccacaactgcttttacatttaacagtccaatgccgtgatgatcccctcttttgctctttatcgtgtcattttcaatttccaccttttctgtcaccggatttctcaccgcaaatatcagtttatgatcttcgcactctaatttcagatgaatgaccgcttttccggtatttttcagtaccttttcactctcccggattgcattatccaataaattagagagcagaatcacaatctcttcctcctctagacatatctcctgcaaatcccctactttcaggataaccgctatgtgtttctcctgcatgctgcggtacttctggtttaaaacagcattgaccaccggatggttcgtgttgattgccgacatctcgacagctatgctctctgtcagcttctgcgtaaatgaaagtgcctcatctgtgtgtccattctttatcaatgtctggatcgtggaaagctgatttttataatcgtgcattttcctgcgctgacgctcatagatttcttcccggtcctgataatctgcaatacgatttttctgattttgttccgtaagtaccgcaatttttattctctcttctttttcaatggtattctgcatgaactccataaggataaggttaatcgcaaccagtcccaccgaaagaaataaaaatacattctgcatatcatcgttttctgaataaaacataagaatgaaaccgaccaccgtaaatacaggaacacagaaaaactgaaaccactcttttcctgtaatcagaccgtagctttttcttgtcttgctaaatcttctgataaacaacatcagaatgataaaagccgtctttgatatcagtgcctgtaaaaaccatttttcttggattgaacctcctcttcccagcaaaacagtcacataatcaatcaatacaagcattgtatagttgatgattgaaaataaaaaactctgccggaaggagacctcataataagccagatttaggaaagacataaccagtataatcaggatacattttaacattccgatccatacccctgtgactgctgccagacaaagcactccgcaataaacaaaaaatctgtatctgttcctatatccgccatctcttttttccataaaagtatcaaaaaagtatagcgttccttttacttccagcatttccgcaataaatgtcaatacccagaatgtcatgttattcttctcccttatacagcatatattccctctttacctgtgcatatcgtgccttgggaaccggaatcttttttcccgtggtaagtgtcatcacatatccgctgatttttgtaatgtacctcatatttacaagaaaacttaaatgcgcccgcacgaatcccatatccttgaattcattttccagttcatccagttttttataaatttgaaatgtccctttttctgtataaaatacatttttgtgaagctctgtttctatataaatgatgtcatctgcataaagttttatcgttccttccacaaaacgaaatttgagaattctacagtttttattaatttctgctatcaaatcatccatacattcttctatggtgtctgcaaggttatctttcagcagaaaacggcttgctttcaccttatatccatccagtgcgtaattcatgtatgccgtcaccagcacaaccggaagttttggatatttttctttaatcctcatagctgttttcagcccatccatcccctgcatattgatgtcctgaaataatagctgacacgcttccaaagccgattgttcttcgcataactgttctccagaatcatattctgtaatagcaaactcataattctttttttcaccatagtctgacagcaaatctgacagattttttctgtcatctatcctgtcatcacaaataataatgttcatatttttcattcctgtctttgatttctctcatgcctgtaaaccatacaagtctcacctggcactctttattatatcaaacaaatctttcactcgatcattctctgcatcaaatgactattttccgcatagaacgactatctcctatagaaacgcagaagcactgtatctcaaattctttgaaatacaatgcttccctgcattttctatatcgtcatgttgatattattactttactatccacatttgctatcctgtgaatgtctgtttgctgatatcttttctgtgccaacatatctcaacgcaataattactattgattctttacctgtccggggagatatttttccttaatctttcttgcatctccacttaatgaatagtagaatattacaaagtttttgactgaccactcatcaaaaaacgatactgcacagactttccatctatacaatatcgtctttctacccattattatactttcattgtctttgccagtgatgtaagtaatgctgccatctccggattacccagtactttcatcagcagctctgcataggtacaatttttactattcgtgataagcttaactaagtgacattggttcagaacccccaccacacaaattcgcaaaaccgcacaatactcgtgctttctcgctgctacgcagctaattttgctcatatgttgggtggtaactctattcgagttcccttaaaataaaaaaaattgccccttacatgcaagcatgacgtatcaatttttcttatttcaaggggttctgaatagttacctttttatataaaaagccccaaaccggaccggttcagggcatattcatataatcacttatacagactacaatattggcacaaaaaaactcccggaatgtatcaaacaatccagagcaacgaaaatctacacgtcatccaatatacgcagtctatattcatcttctttcatccagactatactgtcggcttcggaatctcacagaatcatgcctaacggctcgtgggctataccaccggtagtgaatctgaccctgccctgaagatttctattcacttttcttacgttgctgtatggctacctaaaatgaattttaaacaataaaaacaagacctcccattacacttttcagtatctgagaggtctgtatttataaaaagtttaatcgactgacagtccaatttcatttaacgccaaaatgttttcttttacacatagaatttttttatttgctgtatattctcgcctcatatggttgcaaccattcggactccgtttcatgataattgcacaatacgcatttttgatcaattttttgaaacatcagcttttcatttgtaaaattcacgatcaccaataaacctttgccgtttacttctctttcatatgcaaataatcccggatattcttcgtacatcgggcgaaactccgcctgtctcacaatatctgcatggtcatggtaacactgaatcaaacgcttataataattgtacaatgaatccggatcattcacctcactctgtgcattgattgttctataattatcattgcatttaatccatggctttccacacgtaaatcctccattttccgagtcatcccactgcatcggcgttcttgcattatctcttcctaactctgaaaagtatgcaagtacttcatccggatccttgccctgtccgaccgcttcctcataggttcttttcgcccttatatcatccatatcattaatattcttccacttaacattggtcataccaatttcctgtccctgatatataaaaggcgttccatataaaaagaaatagatactcgccagtgccgatgcgctatagaaactaatattttctctttccagaaatttgttcaggcatctggactgatcatgattttctaaaaagatagcactccaaccgattccgctattatgcgctacatgtgtaaacatttttttcttccaccgttctaccgcatgaatgcttgatttatcattttccccttccatattttcccatccaaaatcgaaaatcatggaaaagtaaccattctttccggcataccgttcaaaagcagcatcgtctacccccggtgcttcggcaactgtcatgcagttatatttatcaaagcactgctctttcatctcatcaaggaatgttccgattcccttataatccgtaagtttttcaaccggatatcgttccccatcattcgtaggacgactggcaaaacttaagtcttttttgataaaggtaattgcatcgatacgaaaaccggcgattcctttttccaaccaccaatttatcatctcataaattttttgacgcagctctttgcattcccagttcagatccggctgttccttcgcaaacgtatgataataccatctgtcatccggtaatctcgaccatacggatccgccaaaattggatcgccagttattcggttctttatcattctccgttgttcggaagtaaaaataagacgcttcctcacaattaggatccttcattgccttctggaaccattcatgctgatccgagcaatgattgaccaccagatccaatattattttaatctttcttttttgagcctcctctattaaatgctccatatcctcgtttgttccaaagattggatttaccttgtaataatccgatatatcatatccattatccacaagtggagaagcgtacatcgggcatatccataatacatctacgcctagattttggagataatcaagtttccggataattccgttaaaatctccgattccatctccgttgctatccataaaactttgcggataaatctgatacactacggactctttccaccaattgtttttcattcacaaattcctcaccttactttattgccccttctgtaataccttttacaatgtatttttgactaaacaaataaaagataataataggagccatgcacataaccaatccggcagaagccaaatcccaacgttttgcaaattgtccaaagaacagatatgtttttaaaggcaacgtctgtaagccctgtttattaataatcagcgatggtaataagaagtcattccatgttcccataacattaataactgcaaccgtgattataatcgttctcatcaaaggaagcacgatcgaaataaacagacgtattgaaccacacccgtcaattgtagcggcttcctccaattcctccggaatattttttatgaacccatgaaacattatgattgccatacttgtttgaaagcccatatacataaagatcaagccaccacgagacagcaaaccgattttgcttgcaaatccaaccaatggaagcatgacacactgaaatggaatcaacatagaaccggcaaatatcaaaaaaataatcttacttgctttggttttataacgtacaagtacccaggccgccatagccgatatcaacagcaccagaaccgctgtcactaccgtgataagcagcgaattcataaaagatcttatgtaatccagttcttgaaacgcattcttatagttttcaagtgtaaatgtttctttcgccggaaatcccaacacatctgtaaaaatccccttggtcgtcttaaacgaattcataatcaaaatataaatcggaaacaaaaaaatgcatccaagaataagtcctgttactccataagcgatttttttcttcattacatttcaacctccttgcgctttgttataaccaactgcgtaattccaattcctgccacaataatcagaaaaacgattgcctttgcctgcgcaaaaccaaattcatttgctccaaaggcagaattgtaaatgtttaacgcaatcatttctgttgatttgtatggtccaccttgtgtcaaagctaaattttgatcaaacattttaaatgaactcgaaatagataagaataatccgattgtaaacgcaggcatcatcaacggaaggatgatatatctcatgagctgccatgaatttgctccatcaattcttgctgcctccttaaccgattccggtatctgctgaatctgcgcaatatatacgatcatcatatatcccgacatctgccacacagtcaaaatcaacaatcctataaatccggtttccggattcgacagccatccgctaaaggctgcaattcccgtcttttttgaaaaagcttcaaaaatcgatataaaaataaactgccaagtaaatccaagcaataatccgcctatcatatttggcataaagaaaattccacgtaacagcgttgcgcctctaaatttctgtgtcactaacaacgccagaccaaagccaacaaggtttaccaatacaactgcgcacaccgaaaaaagcgcagtaaataaaaaagcatgtacaaatgagtcatctctcgtaaaaatgtcaataaaattttgaaaacctacaaacttaacgtccgagcctacaattccattccagtttgtaagggaatagaaaaatccaatacatgtaggtatgattacaacaatacaaaatgcaattaatgacggtgccaaaaagccccaaaaccgtaatttactttttctcatacttcttctatccgtcctttccaaacaaaggattttacccttatttgaatttccgggatagaagctctatcccggaaccctctttaactcttactagttgttctgttgttttcttaacttactccactgctcgatacaggtctttgtaacctcatcccaatcagcttctccggcaagatatttctgtacttctacaccagccacctgctgaccccatgtatttggagctccactgtatacccatccgttcatggtatttccggaattatttgcatccataattctctgtgaaagtggatcggatgcttttattccatcaaaattatcatatggaggaataaacttacaatcattcacaacaattttctgtgcttcctgatcggtgaacatccaattgatgaagtcttttgcagcagctttctgcgcatcggttgccttgctatgaattgcccaatatcctgatacacctacaaaatacttgccatctgaatatcccggaacagaatatggtaacatatccaatttttgaaggacttccggatccgttgtctctactgctggagctacccagtttccctgcttgatacatgcaacacgttcaatggcaagtccaccctctaatgatgttgtgtagtctacagaattaagatttgccgtattgttggcattggttgtataactggcctgaaaatcaaccattttcttatagtcttcaaagccggttcccggaagcgaatctgccgcatatgcttcattcggagtcttaaagtcatgtgttaaagcaacattagcgtcatggtctcctgcaatccataactcctttgtcgggtattccataacagcttccagattcggatatttatccttcatctcaccattatcgattttctctttcaaagtatcaaaaccggccttcatgccttcgaaattcatcatagaatctacagaaactccagcatcctcaaacatctgcttattaataacgaatccataaccttccatgtataacggaatggcatatacttttccgtcttttgtaaaagtatccgttgttccttctaatgcgtgctgcataatatccagatcagaaacatcttcaataacatctccgtaatctttcatgtccgaaaaaccacctacagaaaaaatagtcggtggatccgactgcatctttgctttcattgatgcgccaaaatcatttcctgtgacagcttcaagattaatttctacatttggatgatccttttcatatgctgcaattaatttcttgtatccttcatttgcctcaatcttactctggaaaattgtaatctttacattttttccactgtttgctcctgtcgaggtatctgcagaatttccgcatcccacaaataatcccccaagcattagcactgtcattccaactgctactaacttctttgctttcatatatattcctcccttttgtgaaactgttccatatctgatcaaaaaaaatttttcatctatggatgcctcgttttgtgccacggaactgtccacatcatttgtggaactgttccatatctgtaatatacactatgcgtaactatattgcaacataaaaatgcagtttattcacagattcgttactatatccaaaaatcatcttgattttttattaaaaatcactagaaaaaggagactatgaagaaaagtctgtaaataataatcttctatgataatgattgagctggaagcgctaaattgaagcttccagctcttgttttatatatacgacatgatttcgggcatgtcaagaacagacgtcaaaaacgtccttctcatcatgcatacagattctgttattcttggagtcgtccctcatacataatgctgagttcgccgtagacctgtccccagttccgaatgctcatagtccattttttagtggcttcgaaagttgccagatacagggctttcaggagcgctgtatcacttggaaatacgcttctcttacggttgagcttacggtaggtagaattcagactttcgatagcatttgtcgtgtaaataacctttctgacatccggtgagaacttaaaaatcggtgttattgcatcccagttatcataccagcgtttcatggaatttgggtattttacggtccatttttcagtaactcgatccagagccagtctagccttctcttcatcggaagcatggtaaatcgtttttaggtcggaagcgaacgcttttctgtccttatccggaacatattttaacgtgtttcttacctgatgtacaatacatctctgatactctgtttttggaaatgcagcggcaattgcctctttaatgccactaagaccgtcagcgcagataatcaggatatcctttgcaccacgattcttcagctcattcagaacagacagccagtactttgaactttcattatcaccgacagtgattgaaagaacctctttttttccttctgtgttgatgccaagaatgacgtaggcagccagctttctgatcactccattatcgcgtacggaataatggatggcatctatatagaggatcggatatacctcatccagcggtcgattttgccagtcttcgatctgaggcagaattttatctgtaacgtctgaaataaagccttctgatgtctcaaaaccgtagatatcttcgatggtttcggatatttgccgagttgtcattccttttgcatacatggaaataatcttctgatcgatatcagaaatatccttctgacgtttctttacaatctgtggctcaaatgttgatttacgatcctgcggaacatcgatatccatgctgccatagctgctgtttacacgctttgatttatatccattgcggtaatcatcgctatcagatcgttcagatttttggtaaccaagatgatcatccatttctgcttccatcatctctttgatggtgccgtcaagcagatccttaagcgcatcctggatatcttcagcgatttcaatatcatactcctgaagaagttgctgaatgatgtttcgctttccttctgtcattactactttgtgtacaggtttcttttctcttcttgccataataaaaagcctcctatgatttatattttaccatagaagaccttgctgttattagctatttacagaaaaagtttcacacactcctttgtgccaatgctctccattctacaaagtatcgccctttttatattttacaggaaccaatacttcccttttcttaagcggttgatcattgatcagtttaataagcatattcacactttcctttgcaaccttcttcgcatcctgtacaattgaatcaatcgaatggtaattgaagtccgtggcataagttccatcataagccaatatttttttgtttttttctgtcttgaggaaggcggctgcacacaagtccaaagccataattccatcaacgtccggatattgatccaataatgttctggtacgtttcatacacaattgatagtttacaacttcctcccattgaaaagattcaatgataacctccctattatgcttctccataacatcgataagggctctcgcgctatcggcagaggcaagttccatcctggtcggatcactaaagcacatcacttttttacagcctttttccaaaaacaattcgcccgctaaaattcctccctgatgatgatccgatgtcaccagcgggattcccggtataatccgatccagtgagataattggtttctcaatattcatataatattcatcagaaagaaacgcagatcctacaatcagtccatcgaacagattacgttccaatgtatcaagatattctctttccttgtcctgatttcctctggtattacaaataaccacattatatccgtattgatctaattctgcctcaagataattccaaagagttgagaaatacggatggataatatccggtgtcataacaccgataatacccgttcttttcttatacagatttctgatccactgattaggaatataatctagctcctctaccgccttcttaattttgtttttgcttttctctgatacatatccgctaccatttaacgctctggataccgtgctgggtgctacatgtgccagctttgcaacttctcgaatgcttgccataatctcttctcctcacttgtgtaattgcaaacgaattgcccttatattcccctttatcctcttaattaaatccgacaaccttctgcgacaatcgataagccgcaaccgaaatcttgcggcctcccttacccggaagattcatggtctgtcccataatgccattgcggagttgctggaagattataatatctttttccttaatatactgaagttctattttattatacacctttttgtccatggagtcgaactatttttacttaacagtctcttaaataatctatttaggattcattttatgctcatattttatttacaaacttctcataatatccacatatcaatttcataattagccgatatacaaaaagtatagattaagaaataaactttttctttttcatattccatcattttcaaacggagcttcgcaaaatcaatctgataaaatacactttcatatacccacctaattatcccattttctttcttactctgcacactggatttcatggctgacattgtgcatactttatgtctcattcaacgctgcttttttattgtaccacttattttcctgcctctccactctaaagtctggtcttgtaatttttatcaattttggttcttttctaaagtccaagcatgctctatattgataaaaaacagaaaagaggatttgttatgacaaacgaaaacttaaaaaaattgattttaaccgctttatttgcggctttggcatgtattaccacaatgatcatgaaaattccaacccccggcacaggcggatacatccatgtcggagatgccattgtcatcctttccggagtagtcttaattccatggtacggatttgcagcagctggtcttggctcctgtatggcatacctgatcggcggatattttatttatgttacgatcactttcgttatcaaaggactgatcgcactggcaaccggacttgtttaccgtgcaatcggtaaatccaacaaaatgcgttacgccggtgtccttctcggcgatgtgatcgatatcgtttttgttgcaggcggctacttcctatgcgaattcttcatatatggagccggagctttcgaaagcattcctgccaatatcattcagggtgtcggcggactgatcatctccgcagtgctttatccggcactgattgcagtaccatatatccgtcagcagtcattcggcattgcagataagcagtaattttcattgtttcatatactcaaaagaaggagtttccgctaatgggtgcgccccataaggagtgatttgcgcagcaaatcaacggattccgaatgtttgcagaattgcgagagcagcttgctgcgaagcaattcgtgggcatcagttgggggcaaaagaccttttgcacccaacatcattcaatgtgactaccaaaaatattaatatcagcaaattaacaaatgtagattttccagtaccattgccatacttcccggaagtgcttccaccctccacacttacctctgataccctgactgacatcggtatctctgttccaaataccttgattgatgccgaataagtatcatataccatcagtgaaatatccctggcataattagttctgttatcaaccatagttagaagaattccttcaatcttgagctttggattcagctgcttctttactcttcctattgtcttgatcagctgctgtaggcctttgaccggaagatatgctgcctgcaccggtatcagtacagaatctgcacatgccaatgcgttaattgtcatcattccaggtgaaggcatacaatcaataatgatgtaatcataaaattctctcagcctgtctaccatagatttcagaatcagttccctgctcatggcatttactaatgacacctcaatcgctgacaattcaatgttagccgggataaggtctacaccttccttatggtgcaagattgtcttttctatattcagtttttcatcatttacaatgttcatcatcagtgttgccagagaatactccatttcatccggctcctcataaccaaggctgattgtaagacttccttgtggatcagcatctatcagaagcactttctttccttcctgtgctaatccaattccaagattcacacatgatactgttttacctactccacccttttgatttgatactgctattactctacacataatttgtttctcctttattcatcccaatatttgttcatatttaatttcaacatttccaaaatttcacgcctcatctgctctgccgtgtaactgacaggaaaaaatctgtgaagctgctccgttttgaatactacgcggtctatctctttttgcttaatttcacttagaatatcttccatatcccttactgtaaggttcccatccgcactcaatttctttatacggagtgcctgggaaagtgatggtgtgcactgtgcaaattccattgcatctagcatttccttttgctccttctttttcagaaatgacaactgaaccgccggagtaaatcccatacttccgtcatccaccttttcaagcatttcaggaataagttctgttattttgatatatctttgaacctgcttggggctgtctccacattcttctccaatgagctcaatgcttttctttcccaaattatggtctacctgaccacattttcttcttcctgccttccttttgattgcttcatacttcattttgtaagcaaatgctttttcgcttggactaatcatttcccgttgtaaatttgaatcaaccatagatacaaccgcttcatcatcttttaatacgcgaatgatcacaggtaccttacgataaccaatcttttcagctgcaaattttcttctgtggcccgatataatctcataagtcccatcctgcctcggtctgactatcagaggatttaatattccatacttcttaatactctcctgcaattcaatcatctgactgtccgcctgaaccttgaatggatggtttacaaatcctcgaagtctttccagctcaatctctacaactttttcatcctgatccagcaattccttcttttcttccataggcaacttcctttctctgaacgcaaaaaagcccgtccagaatagattgtatttatctaatctgaacggactcttccgacaggcctgatatcacagacaagaatatagtgttttgtttcactgcttttcctaattttacaccctaaaactcatcctacactgtagttaatccctctgggtgacggctaggaaagtgtgaattggtgacaagcatccatccccgctgacaaaatcagtattttcagccttgtttcgctgacaaatttgtcactgaaattacaattctgcatgaaaaaagcggcaatgaaactatcttcattaccgctaaaaatgagcgtctcctataggaatcgaacctacaatagagtcttaggaggaccccgttatatccatttaactaaggagacaaatgccgtattttcgggcttttcagctcttttggctccggctgccatatctatgaattcaatcactcttgtgatgaatttccattgtatcttattttgacattcaggtcaatccctattggaatcgaactctgacttatcactttccaacttccataagtctcaaccatgattgaaccttaggagttccctatgagctgtggtagctggtggttcgattatcctttatggggcgcttaatggcaaaaaataaagacgaagcctttgttattgctagacgctgttacccgtaggtgtactgccatacaccgtagagtgttagcaagctgttagcaaatgcgcttagttttttgcaatttttacttttttaaatataaatcatttgtcactagaaatcaagatactcgtaccctttggacgttcagaaatgagcgtcctttttatatttcagaaagaaaggagaatcaaaaaattatgataaagattatgaaacgattgcttacgggtgtccttacccttgcaaccgtctttaccacattacctactactgtggttcatgcagcgcagacgcaatactggacagaatctgcggaacgtgtaggaatcgttgaaaaagtaatgaatgacggttctatcggctcaacattcaacgaggggcatatgaccgtcgagggcgaggacgcttactgcatagatataaacacgaattttaaaaatggctataagaccagagctgacgcaagcacacgcatgagtgccgaccagatagctgacgttgctttatccattgaatacgtcaagcagtacacagacagtcataaagtgataagcagtcagcacgcctacctgttaagacagttagtggtctggcagagattgagcgttcatttaggctggggctgcgataacgtgcgagctgcctatgatgaaatccccaaagcgatacaagatgaagtattcgcaggtgctaaagcctttgtcaaagaaaataaaggacgttatgactgttatggttatatctactctggcgagggacaggaattaggacagttttacgcaaagctggctgttggaaatggcaagattcagaaatcttccagtaatacagggattacagaatctaacgactgctattcaatcactggtgcgacttatggtgtctacgctgataaaagctgcaaagaacagcttgccacacttacgacagataacagtggcagcactgaaactgtggaactaaaagctgcgacatactatgtgaaagaaaccaaagctcccaaaggattccagttagataagaacgtgtatactcttacggtcaaagctggtgaaacagataccttgaaagtgagcgatacaccgaaagtcacagataccttgattgagcttttcaagattgatatggaaacttccaaagcagacccacagggtaatgcgagtttggagggtgcaaagtttgtctggaagtattacgacggatattatacaaaagataatcttccagcagagccgacacgcacatggacgacaaagactaaagcggaaaaaggcagcgacaatgcaatccactatatcacccgtttagctgattcctataaagtatctggcgatagtttctatacacaaaacggtacagtttgcctgccgctgggaactatcacggtagaagaaaagtctgctccaaacggttacttattggagggcgcatatatgcaggctgctggaagttcagaacagataaaaggcttgtatgtggcgcagattacagaagatggcgagcttgcagtattaagcggcagcaaccagtattctgtatctgacaaggttatccgtggcggtgtcaaaatccagaaacgtgactttgaaaccaaagataccaaagcacagggcggagcaactttaaaagatactgcctttgcaatcatttccttaaatgataatgctgtcttggttgatggcaagctgtataagaaaaacgaaaccgtaaagacaatccatacagggattgacggtattgctgcgactgatacagataccctaccttttggaaaataccgtttagaagaaaccagcgcaccagagggatatttgacagacggtgcaaaagcggttgaatttgcagtcacggaaaatgggaaaatcgttgatttaacagatgaagaacattccatttacaaccagattaaacgtggcgacattgagggcgtgaaaatcgctgctggcacacacaagcgtcttgcgaatgttccgtttaggatcacaagcaagacgactggtgaaagtcatgttatcgtgacggacgcaaacggtcagttctcaacttctgctgactgggtttcccatacacagaataccaacgagggcaagaccagcgaggacggtatctggttcggtacttccgcaccagacgacagcaaaggtgctttgccttacgatacctatacgattgaggaattgtgctgcgattccaataaaggaatgacactgattcctgcttttgatgtggtggtttcaagagataaaactgtgattgacttaggtacgctgacagatgaatacgaaccagaaatcactatccatacaactgctgctgataaagcaacaggtgaaaaatcaatcgtcgctggtaaaagtgtgactatcgttgatactgttactttagacggtctgaaaaaaggtacaaagtaccagcttaaaggctggcagatggtaaaagctgaaaacgcacagctacttgttgacggaaagcctgtggaaaatgattatacttttaccgcaaagaagtccagaatggaaatcgaaatgacatttacattcaatgccagtgctttaggcggcagcgaccttgtaacctttgaggaattatacgacctttccaatccagacgaacctatcaaagttgcggaacacaaggacattgaggacgacggacagactgtgacaatcacagaaagagtgattacagtccataccacagcgaccagcaagacgactggcgaaaagatgattgttgctggcaaagaagtgacaatcgttgatactgttaccttagacggtctggaaacaggcacagagtaccagcttaaaggctggcaaatggtaaaatctgaaaacgcacagttacttgttgatggaaagcctgtggaaaatgaccttacatttaccgcaacggacagcaaaatggagattcagattgaatttactttcaatgccagcgagcttgcaggcaaggaacttgtcacgtttgaggaattatacgacgtaacgaatccagacgagcctatcaaggttgcggaacacaaggacattaacgacaaggggcagaccgtaacaatcacagagcgtatcatcactatgcacacaaccgcctgtgacaaggcgactggtgaaaagaccatcaatgccgacaaagaggtaactatcgtcgatactgtcactttggacggtttggaaacaggcacacagtaccagctcaaaggttggcagatggtaaaatctaaaaatgcacagctactggttggcggaaagcctgtggaaaatgaccttacattcacagcgacagacagcaagatggaggttcagattgaatttactttcaatgccagcgagttaggcggcaaggaacttgtcacgtttgaggaattatacgacgtgacgaatccagacgagcctatcaagatagcggaacataagaacattgaggatgaggggcagactgtgaccgtcaaggaacaaccagaatctcctgccacaccagaggaatccaatacgccagaaacacctaacagaacaggcagctctccaaaaacaggtgacaatacacctttagctgcactgttagctatgcttggaatttccagtgctggtcttatcttcgcagcccacaagagattttataaaaagaaagctgactaatacgagaggtatcgtctgatgaaagagaaatcccgttcaccgcccattataaaaaagtcagcatatatctgacaatctggctaaattttgcttgatgatgatttatctttctgaatggggattgtcaagggtgcaacgcacaacgcctgcccttgataatccacaggcagacagatattatccagacagcagaatgacactatcaataaaatatagaaagaaaagaggtatattatggaattaaaacacgttatcccaaacatggaaaagacattcgggcatttagaatttgcaggagagaataaggtggaacagcgtaggatcaacggacgcatggcggtcgtttcccgtagctttaacctttattcagacgtgcagagagcagatgatattattgtggtgctgcctgcgtctgctggtgagaagaactttgaatcagaggaaagggtaaaacttatcaatcccaaaatcaccgcagagggttataaaatcggcacaagaggtttcacaaactatatcctgtcagcagacgacatggtgaaagcataaggaggtatcgaatctatgagattagcaaatggaatcatcattgacaaggaaaaaacattcggcgtattgaagttctcggctctgcgtcgtgaggtacatatccagaatgaggacggtacggtttctgaagaaatcaaggaacgcacctacgatttgaagtgtaaggaacaaggacgcatgatacaggtaagtattcctgccactgttccgttaaaggaatttgactacaacgcagaggtggaaatcatcaatcctgtggctgatacggtggcaaccgctacttttcaaggggcagacgttgactggtacatcaaagcagacgatattgtcttaaagaatataacacataacaaacaaatttcaaaaccagacaaatagaattggatttaattgtatctaccattgtaacttgatatactatacttgaattatttgatttaggagtgattacaatggcagatacaaaaaaagaacactatgtacctcgttgctatttaaaaaattttgttctcgacaatgaccgaattaatgtatttgataaatttaaaacacaaatacgtccacaaaaaatcatggatattgcaatggaaaattatttttatgatataaaatttgatgaattgatacaaatggctgaaaaagataaagaagaaaaaatcaaaaatgatttaatggaaatagtgggcgttgataattgggaaagtgttttagatgagttagatgaaaaacatattgaaaaagagttttttagccaattagagggcatttacagtggactacttcaaactcttataaataaaagttacgggggaaatgattgggtaatacaaaattgccttgcatgttctgaaatagaaaaatcttttatggcattatttattgcaattcaaattattaggacaaaatcttttagagataatttaagagatatgattactaaaacatatcagacgcttgcttataaaagtcaaatgaataatgaggacgcacttccaaaagaggcatttgaatgtgaagttaatccagattttgtaaagttgcaacatagtagcatgatacttgacgaagaaatggcagtaggaatcgctgaaacattgtgtaatcatatttgggttatgtatgtaaataagactgaatatccattctatacatcagataatcctgtagctactattccccataagcacgataaatatatgagctatggtggatttaattccgaaggtgttgaaattgtttttccgatttcacctaaattactattggcaatgtatgagaagactacatatgataaattgttttcagatagacaattttatgctttaacatcaaaagatatggttgattactttaattgtcagcaagtctatcatagctatagatgtgttttttctggaaaaactaattttgaacttgcagaaaaaatgtgcaaagaacaaccagaattacaagaatatcaatctcatatagaagttggataattaaaatttataaagcagtaaatcttcaaggtttgctgctttttttcgtggaaaggagattttatatgccacattttcaaaagcgtggaaaccgtatcagagccagcgataaatcgctggtctttcgtttctcggctggttcgctgctcctgctgttccttgcggcggtcttactgctaaacctaaagacaatcgcagcaacagactggaaatcggttcatttcctgcaagatggcagcgtccatctgacggtcacgccctacatgataatttctgtcattggggcacttctaatctgtggggcggctgccctcttataccgcagattccagtatgacagggtaaagcagctctttcaccgtcaaaagctggcaaagatgattctggaaaacgggtggtatgaatctgaaaccataaaggacagcggattctttaaggatttggcagcaaccagcaagaaagagaaaatcacctactttcctaagatgtattaccgcatggaacatggactgctgcatatccgcacagaaattacattggggaaatatcaagaccagctcctgcatttggaaaagaaactggaaacaggcttatactgcgagctggtgtccaaagaactaaaggacagctatgtagagtacgtcctgctctatgatacgattgcaaaccgtatcaccattgacgaggtacaggcggaacatggcagcctgcgtctgatgaaaaatatctggtgggaatacgacaagctcccccatatgctgattgctggcggcactggcggcggtaagacgtattttatccttaccatgattgaggctttgctaaagagcaatgcggtcatgtatgtgctagaccctaagaacgccgaccttgcggatttatccgctgtcatgccagaagtctattacaaaaaggaagatataactgcctgcattgaccgattctatcatggcatgatggcaaggagcgaatccatgaaactgatggaaaactataagacaggtgagaattatgcctatctcggtcttactccccacttccttatctttgatgaatatgtggcatttatggaaatgctggcgacaaaggaaaatgccgctgtgctgaataagctcaaacagatagtcatgcttggtcgacaggctggatattttctgattctcgcctgccagcgtccagacgcaaaatatcttggcgacggaatccgtgaccagttcaatttccgtgtggcattgggtcgtatgtcggagctgggttattctatgatgttcggtgaggttgacaaggactttttcttgaaacagataaaaggacgtggctatgtcgatacaggaacgagcgttatatcagagttttacacgccccttgttcctaaaggtcatgacttcctaaaggaaatcggcaggctgtcaaaaagcaggcaggacggacaggcggcgtgcgaagcgaaagccgcaggtacggactagcctgtgttggtgtggcttgccacaccaaccattcgcccccgttatctaacaggggggcacaaattatctggaaacagttcaataaatatggaaaaagccgctaagacagcggattttccagagattcaaaggaatgtgataaattcagcaacggtcacattccttttttgattggagggattatgactgaatgatactgactggatagaccatttcaaggaacgacggacacagtacggcgtttcccagaaccagcttgcggtcatggctggtgtcagcagggaatatatcagcaggctggaatctggcaaagtagccttgacggaagaaatcaaggtgaaactgacggacgcactggataaactgaatccagaaaatccgctggaaatggtcttggattatgtgagaatccgattccccacacaggacgttaggcacgttgttgaggatattctcaaaataaggcttgatgtgatgatacatgaggacttcggattctattcctattcagagcattatgtcttgggcgacgtgttcgtgctgacttcgcccgataaggaaaaaggcacattgctggaactgaaaggaaaaggctgccgccagatggaaagctaccttctggcgcagcacaggagctggtatgactttctcatggacgctctgctggagggaggtgtgatgaaacgtcttgaccttgccatcaacgatatggcaggaatcttggatattccagagctgacagagaaatgcaaccatgaagaatgtatttccgtattccgcagctttaagagctaccgcagcggcgagcttgtaaaaagcagggaacaggacagatacggtatgggaaatacattgtatatcggttcgctgaaatcggaagtctatttctgtatctacgaaaaggactatgaacagtatgtcaaatacgagattccccttgaagatacgaaaatcaaaaaccgttttgagataaggctaaagaacgagcgagcctattatgcggtgcgtgacctgctgacctaccatgacgcagagcgtaccgcttttgatactatcaaccgctatatgcgattcgctgacaaggaggtggataagcggcgcagcgaatggaaaaccaatgaaaggtgggcgtactttatcggttctgatcgtgggcgtttgaaattaacgaccaaaccagaaccgtacaccctcacacggacgctgaactggataagcaggcaggttgccccgacttggaaagtcttgcagcagatagacgacaccaacggaacaacgtatctcaaagatattttgaaccatgcaaagctcacagagcgtcacaaaaagctgattaaacagcagacaacttccacagaagaaattacaacacaggaggaatgacaacatgaaaaactttttatttgacctgttcctgttctcacttggggcaggttttggtgtagttaccatgtgctttatgcagacagcaaaagccgcagacagagaaattgaaatgatggaaaggagaaagaaataatgaattttggacagaacttatacaactggtttttatcaaacgcacaatcccttgtgcttatggcaatcgctgttatcggagtgtatctcggattcaagcgagagttttccaaacttatcgggttcttggtgattgccttaatcgctgtcggcttggtgttcaatgccgctggcgtaaaagatgtgctgttgaatttattcaataagattatcggagcgtaaactatattatagatagggataaaagttgatataatattcttatatttttcaaaaattaggagggataagatgtcagatatttctgtcagtcaagatttcactactctatgtaaaaatcttagaatgagtgattatattgtaaaagatgttcaaactcgctatcacgctattactaaaagaataaataaagatttctggtttacggattcagaaacaagtcacagtttttatgtaggttcatatggacgaggtactgcaatatatacaagtgatatagatattgttgttgaattaccatggtccgagtatacaaaatatgataattatactgggaatggtcagtctgctttgctgcaatccgtaaaatcatcacttcaaaaaacctattcatcgtctagcataagtggtgatggacaagtagtagttattgatttttcaaatggtattaaatttgaaattgttccctcctttaaactaaacgatggtacatatacttatccagatactcacaatggaggaagttggaaatatatgaatcctaaggaagaaatgaattatttcaacggaagaaattccctttccaataacaatttaaaacgtttatgtcgtatggcacgtgcttggaactcaaatatgacggtgcttatgagtggaattttaattgatactattgcataccgatttatgcagaattatgaatatgctgataaatcatattcttattatgattggttatctagagatttctttaaatatctttatgaaaatgctgataaagaatattgggtaaaatttggtgataataagcatatcactaaaaaatattctttcaaaagtgaatcaaaaaaagcttatgagttagtgctagcggctattgacgcatatgacaagggatattcatatacttggcacaacaaatggagggaaatttatggaacaaaattcccaatatagagaaaatttattaatacaactaaaagaaagttatggtagggttgtttacacctataccagccatttaaagcaagtaaattctttagaaacaaatctccgaggaataaaatattgtcaaattatattatcggctctttcaactggaggatttctaggggcaattattacgaaccaaagtatttacacagtagtagcaggttttttctcgacaatttcactggcttttaatctgttttttaaaaattttaatatagaaaatgaaattaaacaacatattttggcagcagatgaattgtggcttattagagaaaaatatgtttcccttatgactgatttcgatatattaaataatgctgatataatgtctgctagagatgttttactacaagaaacatatgaaatatataaaaagacacccaagactaactccaagagttacagaaaaactcaagaagcattaaaaaaggaagaagaacaattttttacaaacgaagaacttaatcaaatgttaccatctcatttaagaaaaagcagtaaatcttaacggtttgctgcttttttcatgcaaaattttaagacaggaggacaacatgaaaacagatattttcgaggatatgaaagactgggtcggctgcaaatatatttccgacctgccctaccgcaaacgtgaggtatgggaaaccatcaagcagcaatcgccgcttgcctatccagaggaacaactggaaaaattctgccattatgtattcggtgtagattatgctgtcataatgggaatattggaaaacaggaaaggaagtgagaaaccttgtatgaaatgcgaatctatcttttaaacaatacccagccttaccgtgacgacgaggtcgaggggtatgctggcggctggttcaactgccctgtggatttggaggaagtgaaagaaagactgggcgtggagaatgaggaacagctggaaatagccgattatgagctgccttttgaagtacacagtgaaatgcccctgtgggaaatcaacgcaaaatgccgcatggtacaggaaatggagggcacgcctatcggcaatgaaatgaaatccatcatacagagatggttttacgggtttgatgaatttatcgaccacaaggacgagatacgctattatgatgtggctgacggtgcggcactggcggaataccttatctgtgaggaatgtatcttcggtgagattccccatgaactgcaaaagcacattgattaccgttcctacggaaacgagctggaaatgcaggacagatacctgtttacacccagcggcgtattccgttatcagtaaagggggtgatgtgatatagaagaaatgcgaatctatatcgccaatcttgggaaatacaacgagggcgagcttgtgggcgcatggtttacgccgcccgtcgattatgacgagatggcggagcgtatcggcttgaatgaattttacgaagaatacgctatccatgattatgagctgccctttgagattgacgaatacacgccgattgaggaagtcaaccgcctgtgtgagatggtggaggatttaccagaggatatacaggacgagctttctgaactgttatgctgttacagcagcttggaggaactttgcgaacacgccgacgagattatccactatccccactgcaacagcatgacagacgttgcctattattttatagatgaatgtcaaagtcttggggaaataccagacaggttaagaaattacatagactatgaatcctatgggcgtgaccttgatttagagagtcgttttgtcattaccaatcatggcgtatttgagtgcccttattaaataataccagaataacgaccagtggaaacactggcattttttatgcagcagcttgtgaaaacaggctgctgtttccatttagaaacgaaaggagctgtgaacattgaagaaaatcaaaagctatacaagcatatggagcgtggagaaagtcatttacgctatcaacgactttcagctcccgttccccctcacgttcagccagatggcatggttcgtggtatcgctgttcgtggtgattctttttggggagctgccgcccttttccctgattgacggtgcgttcctcaaatactttggaatccctgtggcttttacttggttcgtgtcgcaaaagacctttgacgggaaaaagccttttggatttctaaagtcctgcgtcagctttctgctgcgaccaaaagtgacttatgctggaaaggcggttcgtctgaaaaaagaaacattcaatcccgtgattacgacagttaggagtgtgatatatgttcccgattaagtatattgaaaacaatctggtgttcaaccatgacggtgagtgctttgcctactatgaactgacaccttacaattactcgttcctctcaccagaggaaaaatatatggtgcatgacaacttccgacagcttatcgcacagaaccgtgacggaaaaatccatgccttgcagattgccacggaggacagcctgcgtgcggtgcaggagcgttccaaaaaaggaatcacagggcgacttcgtgacgttgcctgtgcaaagatagatgaacagacagaagcgttggtggagatgattggggaaaatcagattgactaccgcttttttcttggattcaagctgctggtgaatgaggaagaaatcaacctaaagagcatgaggaagtcagcggctatgacctttgctgattttctctatgaagtcaaccacaagctcatgggcgactttatttccatgagtaatgatgagattaaccgttttatgaagatggaaaagctgctggagagcaaactctcacgccgctttcagttccgcaggctggataagaacgacttcggctacctcttggagcatatctacgggaatacaggcgttgcctacaatgattattcctatgaactgcccgtaagaaagcgaaaacgtgaaacgctggtaaagcgttatgaccttatccgccccacacgctgtctgattgaagaaaaccagcgatacctaaagataaagcgtgaagatcagacaacgtatgttgcctacttcacgattaacaatatcgtaggtgagctggacttcccgtcttcggaaatcttctattaccagcagcagcaatttacgttccctgtttccacttccatgaatgtggaaatcgtcaccaacaaaaaggctctgacaacagttcgcaacaaaaagaaagaactaaaggatttagacaaccatgcgtgggaatccaacaacgaaacgggaagtaacgtcatggacgccctcgattcggtcaatgagctggaaaccagcttagaccagtcaaaggaatccatgtataagctgtcctatgttatccgtgtggcagcggattctctggaagaactgaaacgccgctgtgatgaagtcaaggacttctacgacgacctcaacgtaaaactggttcgcccattcggggatatgctggggctgcatggtgaatttatcccagcaagcaggcgttacatcaatgactatatccagtacgtcacttcggatttcctcgctggacttggatttggcgcaacgcagcagcttggggaaacggacggaatctatatcggctataaccttgacactggaaaaaacgtgtacctaaaacccagccttgccgcacagggcgtaaaaggctcggtgacaaatgcgctggcagccgctttcctcggttcgcttggcggcggcaagtcattctgcaacaatctgattatctattatgcggtgctgtttggagggaaagcggtcattgtagaccctaaatcagagcgtggcaactggcaggaaaccttacccgacattgcacatgaaatcaagatagtcaaccttaccagtgaggacaagaacaaaggacttcttgacccctatgtgattatgcgccgcaaaaaggacgctgaaagcctagcgattgacatactgacattccttacaggcatttcttcccgtgacggtgaaaagttccccgtcctgcgtcgtgctatccgttccgtgacacagggcagacagcgtggcttgctgcgtgtcattgaggaattgcaaaaagacggttcaccagtggcagagaatatcgcagaccatatcgaaagcatgacggactatgactttgcacacctcttgttctcggacgggaatgtggagcagtccatcagcttagacaggcagctcaacatcatacaggtggcagaccttgtgctgcccgataaggacacaaggtttgaagaatacaccacaatggagctgctctccgtggcaatgctgattgtcataagcacctttgcccttgactttatccattccgacaggggaattttcaagatggtggacttggacgaggcatggacgttcttacaggtggcacagggcaaagctctttccaacaagctgattcgtgctggtcgttccatgaacgccgctgtctattttatgacgcagaactctggcgacgtggacgacgagaagatgaagaacaatatcggcttgaaatttgcctttcgcagcaccgatataaaggaaatcaagaatacccttgaatttttcggggtggataaggaggacgagggcaaccagaaacgccttagggatttggaaaacgggcaatgcctgtttcaagatttatacgggcgtgtgggcgttatccagatacaccctgtattcgctgacctgttcgcagcctttgacaccagaccgccgatacatacggaagaatcgaggtgaagcctatgaggaaacgaaaaatcctaagattcttcggtatcgctctgctggctgtcttcggcgtgctggtattcctttccatcacaggtacggtggctcatgcggctggtctggtagatactacggtcaatgacgctaacgcctactccaaatatccgctggagaactaccagcttgatttttacgttgacagttcatgggattggctgccctggaactggctggacggtatcgggaaaagtattcagtatggcttgtacgccatcaccaactttatctggacagtgagcctttatatctccaatgccacaggctatgtggtgcaggaggcttacaagctggactttatctctgataccgcaaactctatcgggaagaacattcagactttggcaggcgtgacaaaaagcggcttttccagcgagggattttatgtgggattcctgcttatcctcattctggtaatgggtatctatatcgcctacacaggacttatcaaaagggaaaccacaaaggcggttcatggggtcgtcaatttccttgtggtctttctcctgtcagcgtcttttatcgactatgccccagactatatcagcaaaatcaatgatttttcttcggacatcagcagctcggctttatcacttggaacaaaaatcgtgctgcccgattccagcagcaagggaaaggacagcgtggatttgattcgtgacagcctgttttccatacaggtaaagcaaccgtggctgttattgcagtatggggaatcggacatggacgagctaggctctgaccgtgtggaaagcctgctgtcggaaagccccgacacggacgacagagaggacattgtgattgaggaaatcgaggataaggacaacgacaacttaagcgtcacaaagactatgacacgtttaggcatggtagtattcttgttcatcttcaatatcggtatctcggtctttgtgttcctgcttacgggcatgatgattttctcgcaggtgctttttatcatctacgccatgttcctgcccgtcagctttatcctgtccatgataccgacctatgagggcatggcaaaaaaggcggtcacgaaactgttcaacaccattatgatgagggcaggaatctctctgattatcactaccgctttcagcatttccaccatgttctactccatttcctctggctatccgtttttcatggtcgcatttttgcagatagtcacctttgcaggaatctactttaagctgggtgatttgatggcaatgttcagcctgcaatcttccgacacccagcaggtgagccgacgtatcatgcgccgcccctatctgttcctaaaccgtggggcaagacgcttggagagaaaaatcggcagaacggttgctgctggtgcggcaggcggtcttgtgggcgcagcggcagtatcgcaatcccgtaagacggacaacgcaaaaccagcaggcagcggtcattccagaccaaaccatgacacttccgccgatacgtccagctttgggaaacgtgccggcgcaaaagtcggagcggtgcttgatggtaaggagcgcatgaaagacaaggcaaaatccgtcggtcagcaggtcaaggatatgccgacacaggtacagtatgcgttacatagcggcgtgaaccagatacaggaaaacgtatctgacttcaagcgtggcattgtggaggaaaaagcgaccagaaaacaggggcgtgcggataaacaggagaaacacaggcagaccattgcacagaaacgcatggcaatggataaatcgaaacagtccaatggatcagcgacaaaaggagctgccccattgcatgagcgaccagtgacaacgcctgtacctgcgaaaacagctccgcaggctgcggtttccaaaggagcgcagaccatcaaggaacgccctgccaccactgcaaaggaacagccgcccgtaaaatccaaagagcctgttacaagggtacaggaggtaaggacacaggcggtcagagaatccactgcacttgtcagacagcagacttcacaggctgccgccgataccgcacgacagacggtgcagcgtcacaaacagacacaaagcgtacagaagaaacagaaaaacaagacaaccgtaaataagacgaccagcaggaaaggcggcaagagatgaaactaaggcacttcgttttgttcggaggtgttttctcggtgattatcgccttactgctgttcctgtttatcgttaccgcagatgatgaagaaagcacttcccactttgatttttctggactgaacctttctgaagaagtgctgaaacatcagccgacggtagaaaagtatgcgaaagaatacggaattgatgactatgtgaactatctgctcgctatcatgcaggtggaatctggcggcacaacagaggacgttatgcagtcgtcagaatcaatggggcttccgcccaattccctttccacagaggaatccatcaaacaggggtgcaagtatttctcggaactgttaaaatccgcagaatcaaaaggctgcgacatagacacggtggtacaagcctataactatggcggcggctttatcgactatgtggccggacacgggaagaagtacacctatgagctggcggtcagctttgcgaaagaaaaatcggacggcgtaaaagttacctataaaaacgagatttccattaaggaaaatggcggctggcgttataagtacggaaatatgttctatgtgcggctcgtcaagcagtatctggctgttcccagtttcagcgacgctaccgcacaggcaatcttcaatgaagcattgaagtatcaaggctggaagtacgtctatggcggcagcaaccctaacacgtcctttgattgcagcggtctggttcagtggtgctatggaaaggctggtatcagcctgccccgtaccgcacaggagcagtatgacgctacccagcacctgccgctgtcacaggcaaaagctggtgatttggtattcttccattccacttacaatgctggaacgtatgtaacacacgtcggtatcgtgcgtccagagggacgaaagttagaagtagattaaagaaagggggacagaaaaaaaaggcactaccccgtaagataacacgggaaaccacctgcctaaccgaaaggtgaaaactgtacgggaaaatagcacggcaggaaagcagaaagttgttcaaagacaatagagcacgactgaactgcaaggttaagtgaatatgaggataaaactagatttgttgaatgtgagttccaaacctctgttacgtgtggacacaggaaacttgtctgaaacctgtggtatgagtaacgctgaaaataaatgcctttcagtgggttatcaattaactcatacggtacgctggagaaccagtagtaacggaacgaaagcatatccgacaattcacaccagcctactactttcgtcaactggagattacctaaaccagaatgcctacaatggctatgtgtaatgctcttgtagtgataaatcacaaggctatgctaagtgagatgacgctgaaaatctggcaaggtaacggagctttcatagtagtctgagaatcctgaaaagacagggaaagccgtaaaatcggatacgggaaaaccgttcacatggcaaaggaaagcagtcttagcgaattaaaattagaaattgattagggaggaaaacctcaaatgaaaccaacaatggagattttaaccaaattacaggaaaattcaaaaaagaaccatgatgaagtatttacaaggctctatcgatatttactccgtccagatatatactatgttgcatatcaacacctctactccaacaaaggagcaggaacaaagggtgtaacagacgacacagcggacggttttagcgaaatatatattgaaaatatcattgaagccttaaaaaatgaaatgtatcaaccaaaaccagtaagacgtacatacatcaaaaaatcaaatggcaaaatgcgtcccttaggactgcctgtctttactgataagctgatacaggaagcaatacgcatgatattagaagcaatctatgagcctattttttcagactactctcacggtttccgaccagcaagaagttgtcatactgctcttgctcaaataaaaaaagaatttacaggagcacgctggtttatagagggcgacataaaagggtgctttgataacatcaatcatgcggtacttgtggaaattatcaatcagaaaattaaagatgcacgttttctgaaactcattcgttcattcttaaaggcaggttatatggaagattggaaataccacaaaacatatagcggttgccctcaaggtggcatcatttcgcctattcttgcgaatatctaccttaatgaattagaccgtcacgtaatgaagataaagaaagagtttgatgtggcaacaaaggcacgttatacaccagaatatacaaaactggtaggactacgccaaagattacacaacaaaattaaaaatagcaacggtatagaaagagaaaagctgattgaagaatataaatctgcaacggctcaaatgctcaaactaccagcgaagcaatgtgacgacaagaaaataaaatatgtgcgttacgctgatgatttcctaatagctgtgaatggcaatcgacaggattgtgagaagattaagcaagaacttacagaatttataagtaccacattaaaaatggaacttagtcaagaaaaaactctgattacacacagtaatactcctgctcgttttctcggatatgatgtcagagtacgccgtgaccagcagattaaaccaaaaggaaaattcaaaacccgttctatgaataacaaggtggaattgagtattccattcaaagacaagatagagaaatttttattttcaaatggaattgtaaagcagaggtcagacaatgggaaattagaacctatacaccgaccacaactgcttaataggacagatttggaaatagtgactatttataatgcagaattaagaggtatctgtaattattatgggttggcaagcaattttaacaagctaatctatttcaattatcttatggaatatagctgtttgaaaacacttgcaggaaagcaccgttccaaagtttctaaaattagagctatgtataaagacggtacaggcaaatgggctattccttatgaaactaaaacagtaataaagaaaatgtattttgcgaattatgctgactgcaaaggaaagaagtttactgatattgttccacaaacagctaaaaattattcccatgacgtaacaacattagaaagccgattaaaggcgaagatatgtgaagtatgtgggtgtacggaaagtggcagatacgaaattcatcatgtaaacaaggttaaaaaccttaaaggaaaatcagaatgggaaaagataatgatagccaaaagacggaaaacaatcgtggtatgccacaagtgtcacatggctatacatcatggcgaaaagaaataacctgtaacggagcaaagatggagagccgtgtgcattgagaaatgcaagcacggttcggggagaggactgcacaaacctaccctagaaataaggaaaggcggtgctttcctactctactatgcaggaaacaacagaatgtaccacgctggaaaccttatcggatatgcagatttgacaagctcgtactggcagcaacatttgattggcgctggacgggtaaagactaaatagaaaggaatggtgctatgatattcaagaaaaaagagaaagaatcaaaacctaaaaaagagaagaaactgcctgtgatgaaagttggcacgcataaaaaatccgtgattgccttatggctggtgctgcttgcaagcatcagctttggcgtatataaaaattttactgccattgatatgcacactgtacatgaaaaggaagtcattgaacagcgcattgtcgataccaataggatagagaattttgtcaaaggctttgcaaagtcctactattcatggagcaacacgcaggaatccattgacaaaagaactgctgccatcagcagctatctgacacagagcttaaaggacttgaatgtagatacagttcggcaggatatacccacaagctctacggtgactgatgtaacggtatgggaagtagaacaggctagaacagacgactttaccgttgtctactccgtagatcagacggtaacggagggtgaacagtctgccagatacacttccgcttacatggtagtggttcacgtagatggtgacggaaacatggttatcacccagaacccgaccatcagcaacataccgtcaaaatccagctatgaaccaaaagcgcaggaaactaacggaacggtagacgctgccacagcggaggaagtgacagagttcttggaaactttcttcaagctctaccctaccgcaacggaaaaggaacttgcctattatgtgtctggcaatgccctttctcctgtgaactgcgattatacgttctcggagctggtaaatcctatcttcaccaaagacggacaacaggtcaaggtatcggtatcagtgaaatatctcgaccaaagaacaaaggcaacgcagatttcacaatttgacttgacactagaaaaggatagtaattggaagattgttaagtaaagttgattaaatgtaagagaatgtatataattattctatcttaaagagaggtggttaaaatgaaacgctgcattgttttaactggaatggttattatattttagcaatgataggaggactttaaatgactattccagaaaataaaatttatccacgtaccggagataaagaaacaatttatttaaaaaatgtaatcaaaaatcctaatatagaagttggtgattacacaatgtataatgattttgcgaatgacccaacgctatttgaaaaaaataatgtattatatcactatcctataaatcacgataagttaataatcgggaaattttgttcgattgcctgtggtactaaattcttatttaatagtgctaatcatacattatcttcattatcaacttatccatttccattattttttgaggaatggaatttggataagaagaatgttactcactcatgggacaataaaggtgatattattattggtaatgatgtatggattggatatgaggctgttatattagcaggtgtaagtatcggtgatggagcaattatcggcgcacgtgctgttgttaccaaagacgtaccaccatatactattgtaggtggtgttcctgcaaaaccaattaaaaaacgcttttctgacgatactatttcatcattattaagtattcaatggtggaattggtcgaaagaaaaaatctctaaaaatataaaggcaatacagacaggaaaaattgacgaattacaataacaaatgtgctagaaattaaggtggtgatacaatgtgccaaaataagaaacgaaaaaatgatgttttactccatgcaaagtcagtaaaaacatacgcaatttgcatggagtaagaaagcgtaaatgctggctttgcttttaacaacaagatgttaaaggagtgagcctgcatgaaatatgtaaaagcaaactcaatacttcccatctctctgattgaagaattgcaaaattacattcaaggtggttatatttatataccatctaagaatgagaataaaaaaggctggggagaattgagtggctataagcgtgaaattgaaaaaagaaataaaaaaatcagaatggattataaacacgggaaaagccttgaagaattatcaaaaagctatttcttatccattcattcaatcagaaagatagtatataagtaatttcaggaagaggtttgccactgtgcgacctcttctcttttatgtaaaaaataagtctgtaaataacattatattgtagtgcttactttgcaatgttactattttcaaggaggtgctatatggaaagaaatttaattttgattgattctataccaactattgtttggggcaagaaatcagagaaaatatatatttatgttcatggaaaaaatgggaacaaagaagaagctcttttttttgcaaatattgctgaaaaaaaaggttatcaaactattagttttgatttaccatctcatggtgagagaaaaaacaaagatattgaatgtaatatatggaatggaatacatgacttagaatgtatctggaaatatgttcaatgtaactgggataaaatttatttatatgcttgcagcataggcgcatatttcagtctgcacgcttataagaacagaaatattgaaaaatgtctttttctttcgcctatactagtatagaataaattaaatttctgctatatatttttgagatgatgtatggtaaaatagtgttatcaaagaaaggatgatcgctatgagaaaaacatatcttcctctgtcagatgaagacaggaattaccttaaatcattatcaaaaaagagaaccattcaggcacaagtcgtggatcgtgccaggattcttttatataaagccgatggaatgacattccaggaaattgctgataaacttgcaatcagcactgccacggtacgcctttgtgtttcgaagtttcataaaggcggtgtggatgctgcactgtttgatgttcagcgtcctggacgtccatccgaaatcaccgacgatgcgaaggcatggatgatcagtattgcgtgtcagagaccggcagaactcggttatgcgcaggaactgtggacattggcttctctccataaatacattcagaaacatgcagaggaggcgggatatccaagactttcaacagttacgaaaccttatatccagaaattcctcagggaacaggatatgaaaccctttaaaatcaaatattactgcgaaaagagggatcctgattttgaatcaaaaatgcatgaagtcctgctggtctacaaacagattgaaatgcagtttgatgagaatggtgatctcattgttccagacgattataaattgacgattacggtgtcctatgatgagaaaccgggtattcaggcaatctccaatactgcaccggatttacgcccgacaccggaacacggagaggtatatcgtgatgcagaatacaaacgtcttggaacgctctctttgctggcaggcattgatctgcttacaggagaagccatcccgttagtaagtgagactcacaagagttctgattttattgagtttttaaagatactggacaaaaaatatccatcacaggatacaatccggatcatcctggataatcattccgcgcatacttccaaagaaacacggcgctttctggatacgctgccaaagggacgttttaaatttgtgtttactccgaaacatggctcatggttaaacatgattgaaagttttttcagtaagatgacccggcagatgcttcgtggaatccgtgtcaataccaaagaggaattggaagagcgaatttacaggtattttgatgaagtaaatcgtgaacctgtgatttatcactggaaatataaaatggatgaaatcagtgaagaggaagcggcatccgtttgatatagcaattatttaatattcgttatactagatatggattatttaatacataatatgttttcatggtttgatgtaagcgagaatgaattaaaggaaaaacaaaaaatcgaaacaccgattgaaactttatcatggaaatactaccaacatgtaaaagacaatcctgttaaacactggtgtataccaacatctattatgtatggcagcaaagatatattgcaatcaatagaaattgttcgtcatttttcaatgaaatttaattgccaattatatatatcaaaagaaagtgaacattcatttatgagtgattctgatagaaaagttgtaactgattggatagaggaaagtatttaaatctcatattttgtataattgctactagattagttgaaaatgtaatgtttcccatcattttaatgattaccatttcaatagtttgttttgaaattgcaataaaattatttagatggaaatgacaagactattttcttccgtcgtgttctggtatacttgccagatcaacgacaggaagaaattatatatcattttaaaaaagttgttgaaaatcattttaattgcccttactatttacgtgttgaagtcgacatcaataattttatctttggaggtaatgatttgaaaatagaagaatttaaagatattacaatcgcttatatgcgtaatataggtgaatatggcaaacaaaatgaaaagttaatggaagattttaaagagtttttgagaaagaataaattgtttacagaagaaaccactattttagggattgcattagataatcctgcctttacacctactaatagactaagatatgatgtaggacttatcatagataaaaaatcggaaataaacctagctactcgcaaaattgatgatgggaaatatgcgatatttgaggtcagtcatactaaacaagatgtgttgcaattttggaaaaatatccaaaaccttaccgcagatttatcagtggacgataagcgaccaattattgaacgctatgtctataataaagttgctaatcatttatgcgaattttgtattccaatattataaggcaggtgaatttattaaatggataaagagacttgggtaatgtgtcctatttgcaaaaataagacacgaacaaaagtaagaccagatacagaattgataaactttcctttgttctgccctaaatgcaaacaggaaagtatcatcaatgtaaaaaagcagcaaataactattttagagccagacgctaagacgcagagccgatagcaccgagaatgataaaaattctagtgttatcggctcattgtatttaaggatgtaaacagttttaaggctaaatgaaataaaagtgtaattgttgttgacctcataaattatcaaaatactgatttacttgcctgtctctgaattgacctgtatactgtcatcagcatacaaaaaggaaaaggtctcagagcaccctcctggcaagttgtgtactctgagaccctggtcactaaaccatggttattatatcagattattcacttgtcctcaaggaggattttggtgttttttgttgagagcagtgtgaccacccatatgtgccccatctgtcaggctacgcttcgttaccgggattcacgcccacgcatccgtagaaaggaaggcggtttaaaagatcagttgatcatccggcggttttattgtaagaactgccactcttatcataatgaacttccggattgtcttgttccgtacaagcattacgaaacagaagtgatctccggggtgctggatggcgttgtacagccggaagacttagattctgaagactacccgtcctgcgctaccatgctccgctggctgcaatggttctgcgaaaatcttgaacgtatcaacggatatttaaggacgatccgggagttcctgctgggttataatgaagagaggatttcccctggttcactgctcgattttttcaggaatcaatatcaaaactggttggaaatcatcttacgccagatttacaacagcggaggatttttagtcccgatccgctggtaaggcttatgcacctactttgcatcgtctgtcaaagtaccaaagggtatattggactcaaaaggaggtcattatcttatgaatacaacaataaacagacaacaatggcaagaggaagaagccctcaggcgttttcaattgatttcaccgcttctccagactggtctggatgatgcaaagcgtatccagcttcgcaaaaagattgcagaggaaaacaacatatctgtccgttccctttaccgctatgaaaaagctttttcggaaaggcagtttacagggctaaaacctgctgaccgtgagaaacatcggtcacaaaaacttccggaaaacttttcgttcctgttggaacaggcaatccaacttcgcaaggaggttccggagcggtcggttgcccagatcatctacattctggaaacggaagggcttgcggtacccggtactttaaagcgttctactttggaacgccatatctataaggctggttacggacaaaagcagatgcaaatgtatcaggatgcaagaaacagttcttccaaacgcttttgcaaaccgcaccgtatgatgctgatccaggcggacatcaagtatggacccaagcttccaatcggaagaaatggggctaaggtacagacttacctgtcctcagcaatcgatgaccattccaggtatcttctatcatcccggttttatgacaatcagggagaatcaatcattgaagatacgtttcaccaagcgatttcccggtatggaatcttcgattcctgttactttgataatggaacacagtatatcgcaaaacagatccgttcttcccttgcaaggctgggcatccgtgtgatgtatgcaaaaccaagatccggcaaaagtaaagggaaaatcgaaaagttccatcaggtggtagatgcttttatccgggaatcaaagctgaaaaatatcagaacattggaggaactgaaccgtttgtgggcaatctgcctggatgagtattaccacaagaaaaagcatgatggcattgcagaatactacgaaagcctcggtgccgccattccggaagaagggatatcaccactgcaggaatggaaccgggacagccgtccactgacttttttggatacagccgttgtagccgaagctttcctgcaccatgagcagcgaaaagtggataaaggtgcctgtatcagtttccgtgggcaaaggtatgaaaccaaacctgccctgatcggatatacggtggaaatctcctatgatccggcaaatcctgagatcatcaccgtttcctatcccggatttgaaccttttcaggcaagtcctgtaaagattggaccgtattgcgacaggcagacagcacttccggctgccatgcagggacaagtgccgacaacttcccgttttctggatgcgctggaaacgaaatatacacagagtaagtaccagatggcagatgcgatttcatttgcatcttaccggaaggaggcgaatgactaatgtatgaatcattctttggcatggaacatacaccgtttgtccgggatgtccctcctgaaaaactgttcgaatccaatgctttccgggaaactctcggccgtctggcttatgtggcggaccgccagatgtttgctgttgtaacagctgattcagggtgtggaaagtcaacgcttatccgccggttttattcggaacttccaaaagaggattacatcatcctttatctgtcagactcaaaactgaccccaaggtggttctataaaggtctgctggatcagttggggctggaatcccgtttctaccgcggtgattcaaagcgccagctgcaacaggagatcgaggtaatccggggcgtacagcgtaaaaaggttgtctgcatcctggatgaagcccacctgttagagaaggagacgctggaagaattccgctttttgctcaattaccggtttgattccatgagtcccatggctcttgttttagttgggcagacagaactgtgggaaaataaactaaagctacagcggtatgccgccatccggcagcgcattgacatgtactgtacgctgcctcatcttgaccgttctgaaacagaacaatatatcgcaagccacatggattactccggatgcgggcaggaaatatttacaaccaaggcattggatgagatccataaggcatctgcaggaatcccacggatgatcaaccgtgtctgtgaaaaagctctgatgtatgcgtttcaaaatcagaaacgattgatcgatgattatatgatcaagttcgttgtggaacacgagatgcttgggatggtaacttcataaagcaggtaccgcctgaaaacaggcggtattgcctaactgactggtgacagaaagttaagcaagtgagcgtcaactgatgtgagcaatctagtgacagctcatgaaatcactaacatgtaatacacaaatccaaaggttggaaatgagatattacactttcatattttgaaaatcataatttttttctttttttacactctcatattatcatattttcgcacttttttcaagtattgatatatatgcagctctatgatattaagtatgtagccattaggaaaggaggctatatatgtccttaataaaaggtgtaaattcttcatatgatttacaagaaatgcagcaagtatttttaactgtcggtataaagttaactgctgaggaattatttcatctgttagagtatcagtatagaatctgtcaaaaactaaattgggtagaaactgataataaaaaatttgaaaaaattgtacttccatttcttcattctggattcattcacactggaaattatatgattgtattgaaaagcattatatatatctattataccataaggaagaaatttgattatcacacgacagatgatacaattagtaattttatgtgtcaagagtttattcgatattctggcatgaacttagaatctttatcggaaagaacaataagaatcatagcgaaagaaggtggacaatatagagttgaacaatctatccctatttacaggtaatacaataaatgtgctttctattatcaacactgctttacaacataattatatttcatctgccagagctgatagtttatattgtgagatggaaacactatcaaatgatttggtaatgtactttaatcatggaactagtacctcactagataaaaacgactttattcggatttgggataccataaattatatgtttattcatggatttaatgaagataatcaatcttactattgcttgaaaactaaaaatataagagattattttaacagtggtttagaatgtgtaaaaaaagatattttattaattcaagaaattttagaacaattaaagaaccaaaagctaccaatcaataatgaaagatattccagtatcctctatgaacagatacctgattttttgcaatcattaaagaagtattatgccatattcaattattgttatattgcaggagatttagattatcctttgtatgatgggctgccgctatatcacgatatgtataatcttaaaggaagtgacttagcgttatattatttaaaatgcttttccattgaaaatgctttttgttttaaattttacaaagaattgcctgaattggttcaacagtttgaagatttaaaaggtattcctatttattatttgggaatcaatatttttgaattagtgctctatcaagatatatgtcatattcttttgtacaatagttcgggcatacttcttgaagaaacggatattggcagaataaagaacagattagaaaattcagtagatatgtcaaaagatatagaatatgctttgaaacttatctgttcctcattaccagatgaaatgagtaagtatatttggagatttaaaaatgaaataaagaaaaaatttgaatcatttataaatgatgattttgaattactaatttatcgaaaagcatataaaacttcaaatgttattctacttaattctattcaaagtaatcaacactttttgaaaatattaacacacattcaatcgctaacggacatagaagaaaaaatcatatatcttcaaaatattaaaataaacatatatgatttatttgacttactggaaaatgatatttttgttggaaacgagtataatttatacttttcaacacttacacctaatgatatagcaataataataaaagctctaattccagacttgggagtatttaatcaaaaatgttctttagatgatgaattatacagtgaattagattgtggtgttgaatggaagaaaaaattaatagattttttaaaaaaatacagtattttacaaaaaaaagaagtcgaatatgcacttaataatataaaaatcatataaggagagaatgaaatgaaatctaaatgcaaatggattttatgtcctgtatgtggtaataagacaagactacagataagaaatgatacagagttaaaaaattttccattgtattgtccaaaatgccgacaggaaagtctaattgatgtaaataaatttaaaattagagtaataacagagccagacgctaagacgcagagccgataacaccgagaatgaaaaaagattcttgggttatcggcttattttatttgaaaactaaaaagcggaggattactcggcctccacttctttagattttatgattccgtcagcaacgctttccatgataattaaatctttatcggataagctatcaagctgtttttccaactgtcgtcttctggtgcttttcaccagatcagacgcaggcaggaaaaattcatcaacggaaacttccagtaatgaaacaaggtcatagaatacctgtaaacttgggtgctgccctttgttctcgatatttgttaggtaacgagggtcaatctcaatcattgctcccacctgttcacgggtcaacccttttttcatacgagcttttttgatagcaagaccaaaagctctaaaatcgtatttatcttcttttttacgcatatgtaatcacctcaccacattttactgttcctattgattttctgacaggtacagtaaaacgtatcgtttggtttatcagttcctattatgcgtatcaaagtcaaaaagtgctacctagcggcaaataaaaaaaaccgctatcggcagtaccacttttgcgtgcaaatatttcatttctatttggatagcggttaaaagccgcttttttctttttctcagcataaaacaatatattagttttgattcagcggctctaggaggtagccgcattgaaaatactatgtagacgatattcttcgatttatccgttactgtcaaaaaaatcttagcttatgcaacggtacagtctacttttgaatgtggttttttacatcatatagcaggaataattcttaaagcacaagaacagcatttccatcatgctcttgtgcttttttgctgtttaaaaatatttttcaaattcttttctgaaagcgcaacaaatagctgctgcgtgggtagctactgtgcggaaaggggaatagagggaaaacaaccctcactcactctcacgcagaaaggaggtgaaaatatgaagtcatcttctttcgagcaggctattcaagcacagtttgattgccttacgaaaaaagtcattaagagagcagaaatgaagtataagcgcagtattttaagacgtttgcagcatgaaattccattctctgatgtatcagattttgaattgaataaagctggcgtttacgataattattcctgtgattataccgtgttcaatgttcttggcgtggaagtacaagtatctgacgaccagttaagcaaagctcttaaatgtttaccagagagaaagcgcaatatcattttgttgtcatactttatggatatgtctgacgcagaaatcggagagcttatgaacgtggttcgctccactgtttaccgtcacaggacaagcactttggaagaaatacgaaaaatgatggaggaagaataagtgtggagaacaacacaaaacatataccgtttgctgtgattgtggcggctaccaatggtgatgaagctgcaatacaggaaatcttgaatttctatgacggttacatatcaaagttgagcctacgtaaattgtacgacgagtacggtaatgtatatatggtagtcgattctgaactaaaaggaagaatacaggctgccgttatggatatgattgcaaactttgagattattgtagtttaacaattctgacgggcagagcttttctctctttccctctgcttgtcattctatgaaagtctattatcggatagtagattttcatagactggcaaacacagtcgaatggtctttgaaaattgaataaacaatcagatacgtttgatatgcagcgagccaacgggtattgtacgccatgacctttcaaaacaaagtgagcgattcatgcaatgatccgtgagcgacttttggaatggtcgcccagccatgacctgtatatctgtataatgatacacccgtatgacacggttcacccatcagaatgggaatggtgaaagtccagtgtgcttttccagagctatttgattgttagaaaaaagatatttacagcagcaaaatgtatattcgctttttataaagttatgctataataatttttattaagcgagtgtattttgttgctgtcacaaagaaaggagtctttttagtgataagtgatacacaaaacgcacaccctctaaaaaaggaaaaaaagacttatacagtggaggaaattgctgaacaactgaatattagcaagaaagcagcttattcattggtaaaaagtggtcagtttcattatgttcgtgttggtaaagtcatacgagtatcaaaagtttctttcgataaatggttaaatcaaatttgactattaaggagagaaattatggctacaatcaaacaaagaaaatcaactttttccgttatttactggtacttagacaatacaggtaagagaaaacaaaaatgggacactctggaaacaagaaaagaggcaaagcagcgaaaagcttttgtagaatactatcaagaaaaatatggttatgtattagttcctttagaggaacaatttgcacgccaaattgaagattcaaaaaaagagctggaagttgttgacgaagaaattacattgcgtgatttcctaaaaattttcgtcaatctctacggtacatctaagtggtcacctagcacatttagcagtaaggtaagcagtattgagaattatatcaatccgattattggtgattggaaactcaatgagattacaacaaaaggcttatcaaaatattacaacgatttattgagcgtaccagaagtacctcgttcaaacagaaaagcaactggtcgttgtgtgcagcctgcgaacatcaaaaagatacatgatattatccgctgtgccttgaatcaagctattcgttgggagtacatagacacaagcaagagaaatcctgcgtcattggcgactttaccaaaagttccaaaagtcagacgtaaagtgtggagtattcagacattccgtcaagcggtacaggctgcggaagatgatttgctctccatctgtatgcacttagctttttcctgttcaatgcgtattggtgaaatcacgggtcttacatgggaagatgtgattattgatgaagaatccattgctacggataatgcaagggtaatcatcaataaggaactttcaagagtaaatgctgcggctatgcagaaattgaaagagaaagacattatcaaaatttttcctacacagaaacctcattgtacgactagacttgttttgaaaacaccaaaaacagaaacaagtaatagaaccgtctggctgcctagaaccgttgcacagttactggtacagtacaaaaaagagcagcaggaattaaaagaatttcttggtagtgcctataacgattataaccttgtcatcgccttagaaaacggaaatccggtagaaagccgcattgtcagagataggtttcaaaagctatgtgaagaaaatgattatgaaattgtggtattccacagcttacgtcatttgagtacaggctacaaacttaaaatgacaaacggtgatgtaaaatccgtacaaggtgatacaggacatgcagaggcagaaatggttacagatgtttattccaaaatcattgacgaggacagacgtttcaatgcacagaaaatggacaaagaattttattccactctcaatgaagatactggcaatcaacagcaagatactggtttttcagacgacgatatggcactgttggaactatttaaatccctttcgccagaaatgaaagaacagttattaaagcaaacactcaaaaagtaagttttcaaaagtgttagcaaattttcaaaaatccagcatttttttatcaagaataaaaaagtgttagcaagcctactttctgaaaaagtctttataaaatatcgagtttaagtcacaaagaaaaatggttttccctttcagctaggatagaaacgttagaataaaaaaagctgaaaacctagaaaaatcaaggctttcagcattgtttactggcgtcccagacaggagtcgaacctgcggcgttccgcttaggaggcggaccctctatcctactgaggtactgggacattttcaaaaatctattcaaatttatctggttatcaattcataaggcgattgctccaactagcccttaggaggcgcttgttatatccatttaactaaggaaacaaatatctgttttgggcttaaaatcaagatttttcgatgatttctgctttcgcagtcagtgtctgaattatccatcagtctaagccttttctttttcagtataccagatggtatctatgtaccatctggtatactgtattgtctaattgaaattgtactatatcctgattaaaattacaagagtataattaatttttcaggaatttagaaatattgttactgttctaaaaatgtacctgtccctgaagccagatattggctctcagccttcttcctatagttggctcgcctaaaaggtcttctctgttaatacagacatcaaactgcatattattgcattcgacagtcatctgtacaatttcttctcctgtcaaaatatttttgaatgtatgaacatccagaatttctcccagaatactgtactgatcgcactgaattccatatggcataaaataggattctactatggaaaaaagatcctctgttgcaattctctgagaaatcatggagtatgtatccatatcctccattgtaagactttccattgcttcttcgtctccatctctggcagctgcaatcagattgcttctgtttttcataacctctttttccacttttactgcttctttatctttcattgcaggaagtaaaacccgtccttcttctgcaagtccagtcaaagtcaccggctgtgcacccagattctcttttcccttttcctgtagatattctgcagcattctgaagataaaaaatcaaagtaattcctattctcaggtcatcacaggctcctgcaaatgactctctgtccagatgtctttccacagttacctgctcctgggtggtaattccggttcctctgaaaaacgggaaatagtaatccacatgaaaacgattatattcgtcatactgaccacacactgtaataccgcagtcacatccataattctttgaaaactctgtaaaaatgccatccggatgatcttcaacagctattttttcatcatagttccttacagtatctccgataatttcttttatctcttccctgcttctgactttggaaaaaccaaccgccctcagataactgtgcacaaaaacacctccatacccgttttatgcacgggtctttttctcaatctttttcataccgcccatgtatggctgaagtgcttccggaatgtttacagaaccatctgcattcagattgttttcaaggaaagcaatcagcattctcggcggtgctactactgtattatttaatgtatgagcaagatatttctttccatcctcaccattgacacggatcttcagacgacgagcctgagcatcgccaaggttggagcaacttcctacctcaaagtatttcttctgtcttggagaccatgcctctacgtctatggatttcactttcagatcagccagatcgccggagcagcattccagtgtacgaaccggaatatccagagaacggaacagatcaactgtattctgccataatttttcaaaccacattttgctgtcttctggcttgcatacaacaatcatttcctgcttctcaaactggtgaatgcgataaacgcctctttcctcaagaccatgagctcctttttctttacggaagcatggggaatagctggtaagagtttttggaagctcctgctccggaatgatctggtcaataaatttaccgatcatagaatgctcacttgttccaataaggtaaagatcttcaccctcaattttatacatcatagcatccatttccgcaaagctcattacacctgttaccacgttgctgcggatcataaaaggcggtacacagtaggtaaatcctctgttgatcataaaatcacgggcataggaaattactgcggagtgaagtctggcaatatctcccatcagataataaaatccgtttcctgcaactcttctggcactgtccagatcaattccatcaaagttttccatgatttctgtgtgatacgggatctcaaaatcaggaacaaccggctctccgaatttttcaacctcaacgttttcactgtcatcttttccaataggtactgtaggatcaatgatattcggaattaccatcatatccttcagaagctcttcttctacttctttttctcttgcagaaagttcatcaatacgtgctccggaagcagccacctgctttttaatttcctctgcctcttcgcgttttccctgtcccatcagagcgccaatctgtttggaaattttatttctctcagctcttaacgcctcaacctcctgcttaatggctctgttttctttgtccagctccagaaccttgtctaccagttccagcttgctgtcctggaatttattccttatattctgttttacgatctccggattttctcttacaaacttgatatctaacatgattttcctcctcaaaatttaacttttaatttaatttgtcagtttcatcctcttccagttctcccagtccaaaattgacagcttttcttaatgcctcaacttcttcctggctgagcattacataagattcaccttttacaatttccttcagataaaggaaacagttatcgcgactgtgaaccgcatttaagatcagacctgtattttctttatcaagaagagcaagcgcaaagctgagtttgccgcctacgtcatcaaaagcatcgtatttttctactccatacttgctgaagatcactctgaaatttttgacaatcgactttattgtctgctcatgattttcctttgcctcatagagccggtcaatctgtgcaaattttctcataaatgtcttttccagtgactgtgcatcgctgcccttcataaacatcttatattttctctctagcctgctcagtctcaaactatagcttatcatacttccaatcaaaataattacaataatcaaaagtatgataataataattccgggatcaattcctatattttcaaaaatagcactcatatgatctgatcccccttttatccaatagactcaaacagatcaatgatccgttccaggtcttctctggagtaatactcgatttctattttgcctttattattcttctttctgtgaataaatactcttgtacctgtgattcctttcattttttcttccagactttcgtaaacagcatcctctgctgagtttgaaactgtctctttctgacgtgaaggtttcaaaattttccgcacaagagcttctgtctcacgaacactcagtttatgatcaaatacttttaaagcgatcatttcttgtgtttcaaagtcagaaatccccagaattgcacgggcatgtccggcagatatcatttcatccacaaccatttcctgaacccgcggtgaaagtttcaaaagacgaagagaatttgttactgctgtccggctctttgaaacccgttccgcaatctcatcctgttttaaatgaaattcttcaattaaacgcttatatgcctgagcctcttctaccggattcaaatcttctctctgtatattttcaatcagagaaatttcaacaatctcctgatctgaaaactcttttattacaacaggaacttcttttaatccagccatttttgcagctctccaacgtctttcaccagctatgatctcaaaatagctcttcttatcagatacaagaagcggctgcaaaattccatattgttttattgattcagataactccaataatgcatcctcatcaaactttttacgtggctgttcacgatttggctccacttttgagatttttacaattactggaccgcctgctgttttttcttctttcttttcagaggttttcacaggatgaactgctgttttttcttttgtatcctttgctcctgattttgaaggaacagacttttccggaaaaagcgcatcaagacctcttccaagcccggatttttttactgccatcattcaccctccctgtttattacttcttctgctaacaaacgatagctttctgctcctgcggagcgtgagtcataaatagtgattggctgtccataactgggggcttccgcaagtcttacattcctgggaataattgtcttataaatattctgctgaagattatccttaacattttccactacctgcaaagataagtttgttctggcatcatacatagtaaacacaacgccttccataacaagacgtttgtttaatctttcttttaccagatcaattgtatgtatcagctgagataaaccctccaaagcataatattcacactgtattggcacaagaaccgatgtagctgctgttaaagcgttaatggtcagcatatttaaagatggcggacaatccataataatatagtcatattttctgcgtattttgtccgttattctttttaaaatatactctttatcatctacgccaatcagttctatttccgcacctgacaaattcacattggatggaattaaatccaaattttccactacgtttttaacaattgtactttttgcatctgcctgtcccagcaaaagctcatacagcgtgttctccactgcatttttatcaactcccaggccactggttgtatttccctgcggatcaatatctattgctaaaacttttttccctttttccgcaaggcaggctgacagattgatggctgttgttgatttgccaaccccacctttttggttagctaccgctattattcttcccaattttcttcctccttttgagggattatagagatgttttcattatagcacttttatatgtattgttccactctatgtttcacgtgaaacattaaattttaggaaactctctaaattaattattgttaatattcaacaattttatacactttaagaaaatattttttatcattgcttaatcataatttattcagaataccataactgaacaaataccaattttttcacaatagagtctgcaatatacgggcataaaaatcgttaatctcagcatgcaagtctcacatggacagaacaaatcagcaaaaaagcttgtgctcttttcaaatttgctcttttacagcagaatacctaaagcagatagatttgtacttttctggcacagtttataattcaatatttcctactcacctataaataaacaagtatccgtttgtaaataaagagctccgtaatatacagcaaaaaagattcattaaagcttatatgttgttaaagaaaaatgaaaaacaaattttgtataataaaatctgtgatatgagaacacaatgaaatgtcaacctctatatatacgtctcataaagacaaacaacgaagatttgtgtacattttcaaatgtttgcatttacagctataaatatgaaatctaaaaaagtgacataaaggacgtaaaattttcgctgattaatctttgtatgtcatatataaatttaataattcttttatatatgccgcaatgcatatataactttcacttttaaaaatctgatacttacacatttataaattttactgcttcataactataaaatctttgatgacattttactcatagaaatttatattctctaactataaatcagtaaatatagaattttgcacaatagaatcgaatctatcatatacaagcataaaagaaatatcaagctctatatgcgcatcttataaagacaaattttcgaggattttgcgcactttttcaaatttgctcatcaatagttctctaatgtaatttacgatcaatccctattctggtagctgtccctaaataagaatagaatcccacaaaacatcaatgacaccacttagtttttaaagtaggcataatatacaaaccgatgaaaatatttatcaagaataatataatttatatatcaaggcaataaaataaagcctttatatgttttccccgtaggtgcccatttatttacaaagtttcacgtgaaacattattaatttaattgaactttataaaagcaatagaaagcttataatttttatactgataatgcctcatctaaatgcattacacaagtatgtttcacgtgaaacatactcattcttcaaatgtaaaaacagctgatctctgttgatttatttacaatttttataagtgttctgtttgtaggcgctaaatcaacaagtaataaattttatatctttaaataagcaaatctgaaaaagtacgcaaaattcttattgccttatctttgtgggatgtacatatagaatctaaagcttctttgtgtccttatattagaggtactattatataaaattctgtatttgttcatttatcgttttatataataaaatctaaagtatgccactaatattcttcaggttttatagatatattacataaaataaatacgacataattttgaacttatcagtatccatgtaataagtaaattaaaaatcatacaaacctctcttgggtgtatctctgtgtagtgttatataaaaattgtttgtgtccacatattataatccccattatataaggtttagtgtttacttgcttataaattattgtgttatcttatatctgccattccccatatacgcacattagagaaaaatgtttcacgtgaaacatctttctttttcaaatgtaaaagtcctccccttctcatgaccatttacattttttgataagtgtttgtttaatgaacagatatcagatttcgtatagtagaatcaaaatctaaagtataccaccaaaattttccaatttttatggatatatttcatagaagcaaaacataattttgaatttataatcatctataaacgagtaaaataaaaatcgtacaaacttcccccggagttatctctgtgcaattttatatgtacagaagagagtttgtttacgtcttcatattataaactccattgtataaaattcattatttacttatttatagattattgtgctatcttatatctgatatttccccatataagcatgtcagagaaaaatgtttcacgtgaaacatcttcttttttcaaatgcaaaagtcctccctttctcataaccatttacagttttgataaatatttgcttatacgctgtaaatgaacaagtatcagatttcgtatagtacaatcaaaatctaaagtataccaccaaaatttttcaatttttatggatatatttcatagaagcaaagcataattttgaatttatgatcatctataaacgagtaaaataaaaatcgtacaaactttccctggggttatctctgtatgattttatatgtacagaaaaagtttgtttatatcttcatattataaacgctattgtataaaatttattatttacttatttatagattgtttcgctatcttatatctgacatttccccatatacgcacatcagagaaaaatgtttcacgtgaaacatcctttttttcaaatgcaaaacaactccctccgccgactcatttaaaattcttaataagcgttctgtttataaggtgtaaataagcaagtacccgattttactatgtaaaatccaaaatatatcaccaaagtattccaagctctatagatataactattacacattatatgtgttatcatcattctcccttctaaacagtgaaaaaagaatgtttcacgtgaaacattcttttataggcatactattttaaatcaaatatttattccctcttatataattacatttatttcatttcaatgttaaaacacagatattctttagctcctctctgaattctattatttactggcagcataaaatatcaacaactcatgttttcttgaaatctatgtagccagtaaatacaaagttttcaactcaaaagaatttttgttatatctgtgctctataatgatatattatttatacaatatctttattttttaattatttttcagaatttcttttatttcaggaattgtttttccctgttctcttaacgatttgatataataaatacgttccaggctttcttctctcctatatctccttgtaagattgtgttctgcctgctcaaaggaaatcattccctcttctgtataaaatttaagcgtactgtatctcatatctgtaagtctgaccagctcgccaatcgtgacatactccgattgctgaataacctccatgcttctctgtcttgacacatctattctccttaatttgtattcataacagtcaggacagtcattatagcaataagattttcaatataatcaatcatttcttttatcagtagtccggaatcagaatttacaatttctttcagcttatgccttatttccttctgttcaaaagatgaaaagtattctttcatgattttgcttctctccagaagggcaaccaggcaggctatgtcctctgttatttctccatcctccagaagttctgatctgatcaaatctactacataatgaacagcctgttttgtaggaacataattttttcgtttactaattataccagattctgtaatgcttacaagtcccatctcttctaaagaggtacctactgcgccaataagctcccttaatttcctgtctgaaaatgaataattatattcttctataattttttctatttttacaggtttgggctgatttataaaattatataaaggtttcagatacatttttttagccggaagctcaccggttactcttaccttctttttctccagcacaatacaattttccattttcagttctaaaagaccggaggcaaccacacacaccagtttttccacattgaatcctgaaatctttccttttccatgcattgcacaaattaaatattcctgagtaattgacaaatctctcatttctttttcctccttaaacctcttcaactctcaaagtctgttccttttactttgtttctcataccttacctggcgctttcaatctctgtaattttcaaagatgatgtgaatctatttttcctgaatttattatagatttctttacacttctactttcaaaagcgctttcagcattttaaaaacaagaatttttttcatctctgctttcagagttttaaataatgtcttttatgccatatgtttatagaagtgattactatctactcgccacttgctacttacgatttaaagatacattcattttataactctgtcaatatttttattaaaattttattttctactactataaagaacaaatgcagagttttgcataatagaatccatacaatatggatgcaaagaaaaaagaaaattaaaactctatatatacaccgcacaaaaataacgagaattttgtgcgctttttcacatttcctcattatatagtcctattgaataaaaaagaaacttcccatacagaacgaataagaaagtctctcatatttgcgcatacagattttactttttcatttcaggattttctatcacgttgcttttgatagcaatattttaacaagctataaatgaactaatgccaaattttacacagtaaaatctgcaatatactgccacaaaagaaacattaatctcgacatgtaagcttcacaaagataaaccagcgaaaaatttatgctcttttccgtattttatcatttaaaagaagaaaaatatatttataactataaatgagcaaatttgaaaaagtttacaaaatcatcacgaagttgtctttataaaatgcacatatagagcttaatatttcttttatgtccgtatactgcggattttattgtgtaagattcgatatttactcatttatagtttataagattacaaaaagccccaaattaaagtatcactaaaaacgccgtgataaacagctcacagcatgagatctgattatcacggcttacaattcattttgaagtaaatagttttcaccccagttacacagttcatcaagaattggagttaaagttcttccaaattcagttaaagaatattctgtttttggcggaaccaccgggtaaaccttacggttaatcaatccatctttttccagctcacgaagctgttgcgccagcatttttggaatacgcttatgaatctcactgtaccataatgtttaattcattaagtgccataaaatgacagccttatattttccgccgattaattgaatggttgcttcaacggggcaattaaaaccacagcaattactttccataatgttctcttactttcttttcaggtagtatattacaaaatagtgcgttcttgtctaataaagtattacagatataattatagtacaggttgacctgattcacaagaacaaaggagattaaaaagcatgaatgtattagatattgcaaaaaagagatattccgtcagagcctacaaaaataagcctgtagaaaaagaaaagctggataaaatacttgcctgtgctcatgttgcaccaactgcggcaaacctgcagcccgttaaattattggttgtacaggacaaagaacggttgaaaagtattgcaaaagccggaaacatatataatgccccattagcgattattgtttgtgcagatcattcaaaagcgtggaaacgaccttttgataacaaacagacaacagatattgacgcagctattttgacagatcacatgatgctccaggcgacagagctgggattaggtgcggtctgggtatgcttttttaagccggatataatcaaacaggaattttcattaccagatcacctagatcccgttaatatattagctattggctatggaaatgatgcaccggcagaatagaaacattcatcaatcaatgcatttcacgatataaagccaggatgctgattttctgcacttttgggaagttactcctggctttcataaataacaagagccagatctgagcagggtctgactcttgatatatcatttgtttttatagtaaactatagatgagcaaatacagaactttgcacaatagaatctgtaatatgcaaacgcaaagaaatcataaattctatatgcggctctcacaaagacaaagtaaccataattttgtatactttttcaaatttacttattcatagttattaaataagcttttacagaaaaacaccttatcttctgtgtatcattaaagcaacctcgactgaatatgaatataaaagcccaacaaacactcctatactgcaaacaatgatgccagatgccatactctttttactttaccgcctgatatcttctatatcctctgtagcctcccaccgccagcagcgctgcaagagccacatatataattggcagaagctgcatctgggtaaaatattttccaaacaggggtatcaggcggcagtccagaaggttccaaattgccagggcattggacggaatacagagccataactggcttgccatacgaaattgatccggaatattcactgccatggaaagcaaaaggattccaaccattacagccatagtgcctgtactgcttttcaatttttctgcacagaacatagcaaatgccgattccagaactgctgctgtcagcagtatgagaagctgtatgcccagtacctgtccgatggtaagagaatgggagcacgcaggatatatcatttgtatctgtgtattcagtccatggaatccataaaggatcaaaacagggatcgcacaggccagaacaaggcatatggtccccccaagagaaagcgttactccggctgtgatttttgctgcatacagggttttctttccatatttgcagcaaaaattaatatgatttacttttcgaaaatgttcttctgcaaatatcgccggtactgcaacagctacaaaaataatctgcatgaccaccattgtataaaacgctgcaatgagttttctctctccggctgtatcttcataggtaaaaggaacttttattctgctttcctgattttcccagtattccctttctccttcccgcagcttatattcctccatatcacggttcagcatcttcttgcgttccccatatacattatcttctgttatattttttgtctgtatctggtctgagggtaataaacaggacaaaaaatacttcagaccatgcggatattctttattcttatattcttcaaataaagcgtcatccacaggttttcctgcaatttccaattctttctgtctgttttcatgaatatactgaatgatattctgtccgtctgaattaagtccaatatcactgatacatattacaaatgcggaaagcaatatcataattccaagggtgatccagatgatcttgcggcgaaaaagcttcagatactcgtaccctaagattcttttaaaatcactcacagcctttcacctccccaaatttttcaagataaagcttttccagatcacttcctgtttcctgtctggttccttcaaaaataagctgcccctctttcatcatcagaattttatctgcaatctgttccacatccgatacaatatgggtggaaagaagaacaatattgttttctccctgttttgcaatcatttcacggaaccggactctctcttttgggtcaagcccggctgtaggctcatccaggaccaaaattctgggccggttaataagagcctgtgcgattcccagtctgcgtatcatgcctcctgaatatgttttgatcttctttttttccatacctttcagtccggtcagttcgatcatttccagacagcgtttttttgctgtgctctttggtattcctttcagggctgtcagatacattaaaaaatccatgcctgtaaactccggataatatccaaagtcctgcggaagatatcccaggatttccctgtattcttcctctcctgcttcttttccgtccagcgtaatggttcctctgtccggtgttaaaataccgcagatcattcgcattaaagtggtttttccggctccgttggctcccagaagcccgtacacaccgggagtcagattcaaagaaaaattgtctactgcaattttatttctgaactgtttcgatactctgttaatcaaaagctccatgcccattcctccgactgaagtaatatcattttccattccctgaaggtcagcattgccagtatgacaagactgagcacccatcccaggggtttcataagggaataaatatttattttgctgtaagttaccaccagaacagctccgcagatcaatacagaaactgcgctgcagtaatatatgctttcctttccccgaacttttctgactattgtaagattgcagtaacaggataaaagatatggaaacagaataaccagggcggcagaaagaaattcatatgttccgttccacatcagtaatggaaaaagagctgcaagaacaatcatatttcccagtccaagaatcataaattttgccattaaaacagctttcagggaaaatcttgataccatttccagttcttccatcccatatcgtacagatctactgccttctgccacaaaggacaaagccagaacaggaagcatagctgccagaatacctgtatacattctgtttttgtcaaatgcggcgcagattccacctgttaataccgctactgaaataagccagttccatttgcctatatatcctgtctggcttcgcagaaactccatattactcattctgctttccggcatcctctgcaaaaactcctgttttcgtaccggatccggcggctgatacagcatttgaagctcttttttcagtttctgtttcaatcttatccctccatttcctttttcagctttttcagacattctctatcctttctgtacagagcaaatctggaaatccccagtatctctgctgtttttccaacggaaagctcgtttacataccgcagaaagacaagctcctgctcctgagcgtccagactttttatggcttttctcagatccatatgtactgccatcctctcctgaatattttccatacagccggaaagttcttctgaaagcgcttcattcttttgttttcttatctgatcaatacagaggtttcttgcaatcctgtacagataactgatttcttttcccatatctttataagttttattttccagaaaacggagaaaggtttcctgcgtaatatcttctgctgtctgctgatgtcttaatttcatatagcagtaccggtatattttgtcatattgttcatccagatctgtatgcatcagaaatcctcctctcataatatttaacggatcagcgtctggaaatgtgcggaaattttttataaaaattatagaaatgcctgtattgtaccacttttcaattcgtgataaactgtttcgtagcaaacagcaaatcttatttcagactgcctgcggcaatctgattttaacacacaaaggaaagtgaggcttatctatgttatactttgaaaacgattactccgaaggcgctcatcccaaaattcttcagaggcttatggatacaaatatggaacatttatccggctatggctctgaccgctacacagatcttgccaaaaataaaatccgggatctctgtaaatgcccggaagccgaagtttattttctggtgggaggaactcagacaaaccagactgtaatcgactctgtgcttaaaagctatgagggcgtgattgctgctgagacaggccatgtaagtgttcacgaagccggcgccattgaatttacaggccacaaggttctcaccctgccccagcatgacggaaagctctgcgcccgggaactgaaagactatatggagacttttctgggagatgacagccatgagcacatggtttttccgggaatggtatatatttctcatcctactgaatacggaactctttacacaaaggatgaactgaaagaactttctcaggtatgccgccggtttaagcttcctctctatatggatggcgcccgtctcattaccggtctcgcctgccctgaaaatgaactgtcgcttcctgatattgctgatctgtgcgatattttttacatcggcggtaccaaagccggcgctctgtgcggagaagctgttgtttttacaaaaaataatactcctgcacattttcttactcagatcaagcagcacggcgctcttcttgcaaagggaaggctctgcggcatacagtttgatgctcttttttcagatgatctttataaggaaaacggcagaaatgccattgaaacagcagctcttctgagggaaggacttcgtcaaaaaggatataccttttataacaattctcccaccaatcagctttttctggttatggaaaacagcagactggaagagctgaaaaatgatgttgtatacagtttctgggaaaaggctgacgatacacataccgtcattcgatttgccacaagctgggcaacttccagagaggatgtagaaaagcttctttctcttttatacttgagtttccgcaaaatgtaatttcaaaatgaatagaatctcctaaagtgtcaatctgccgatttttgaaattttaagaaaggcagttccgtgaatagagacactttaataagccctgtcagaaccggacttttgggagaactattcttttatctatttaagcggctagcttaaggcagagttgacggtatgccggacgttttgtccggaaccaaagcctgacgccctcttttgcataagaaagtatgcctgagatgccttttgccagccggtaatagcagaaaaaaactttttcctttacaggatttgctgcctttatgatggaaaccttaagggcattggtctctgattccattgaaatcattgcaagaaatgccatgcataaggtgatataaaaattaagcgcgttgattgccttcagcttacgcacacgaaagttctcgaactggaacatctgctttttacagcggaaatattcttcgattttccagcgggaaaagtaagtccttgccacccggattatatcatctttcgatttgatttctttattagtaacaagcatcatcggatgttcggtaatgccgtaaacaagcacaagaaaaatgtcctttctggatgcagtaatctgtactttgacatgtgaaaggtaggcttcatggtttttgcccttgtaaaaaacatttgttttcaccttccctttcctgcgattacgaagttctgtagcctttgtccatttgttatggtacaaaagcttacgattagactttaaacggatcacataatcttgtccgagttcatccaacttcagaaacatcttattgtcatcgtagcctctgtccatgacaaaagtggctttgccaaagagagagtttccctgttcaattgcttggaaagtaattgtatttgcagatttatagtctttttcatgagacgaatgtattttagaaaaaatactaacaggatgattggcggaagtaagaatgcaagcctcggttacatgataaccttttttataaacgcttttagtggatgtactttctgaaccatcgcggacaattccaagtgattcaaatttatagccatccggcttaacaacatcactgtcatcaatgtaaatgataggttcagaagaactccattttttaacttgttgtaggtaagcggaagcagcggatgcagacacacctttttcaaggtgtctagataaacgatcaacaacgtttatctttttggaaggttcgtgaagctgatcacagacatccgttaacaggcaacttccggaagccagcataccataggtaatgtcagctgtaaattttctttcaggctttgaaagttttcttgaaaatttctttgtaaaagttaaaatttttcgtttcaaaatgtaagtgtttgatgtaaaatgagacataaggaatcccctttctttttgtttagtaagatttttggttggtagcttaattttacatcaaaaagggagaagattccttatattttaggcattttttaaaagttgtttataatgatatattacaaaacaggtgactgtggataaaactgcggaaactcaagcttttatagcattgtaaaactcattgttttggcgtataataattgcagtcagatcacgtgaaaaggaggtctcatatgaagaaaaacaagaaccgtctaaccacatttgtagtgctgttctcctccgcaacagccatcatccacattgcaaacaagatcattgccgcatctgcatctctgaaggaaatgcttgattccaacagacgtaactattataaatggcgttttggagaaattttttatacaaaaaaaggaagcggaagtcctgttctccttatccatgatatgcttcccggagcctgcggctatgaatggaacagaatcgaagaagagcttgccatggaacatacggtatacaccattgaccttctgggatgcggacgctctgaaaagccgggagtgacctatacaaatttcgtctatgtacaggtaatctgcgactttatcagaaatgtgatcggagaaaaaacagatgtgatcacaagcggtttttccggctcctttgccgttatggcctgccgcaatgaaaaaaatcttttcaacagactgattcttgtgaatccgcctgcccccggcaacctgacacaaatgccgtccagaaaagaccgtctgctgaaatatttcctggaaattcctgtatttggaactcttgtttatcacattattgtttccagagtaaatacttcggacttttttattgaaaacatggtttttgatcccttccatatggatcagaatcttcttgatgcttattatgaagctgctcacagaggcggatgtcaggcaaaggcagcctatgccagcaaagcttcccgctttatgaacattaatatcctgcctgcattaaagtccattgacaacagtatttttattattgaaggcgaagctgaaaataacggagctgctgttgtagacagctatcgaagcatcaatccttctgtggaatctgttacgattcctcataccaggcatcttccccatatggaagatccggaaaaattcctggaacagatcgggattttcctgtaacatactgacaactgaattgtatatgatcctgcagctgtttttccacacagctgtctgtacagagaatgcccccggaaattaatttccgggggcattccgcattctgtaatcataaccagtaattttacgggtcaggatgcttcttggctttcttcagaagaatctgtattcagcatttcctgatatgcgtctgtaagatcacgtatatccattttgtttacaagataaaccttatcacctgtcactgctgcataaaagctggaatcgtactcataatagcttacggttgttttctgtccctctgtatcagtgaaaacaaaggtaaaagcagcagcttcatccggcgtatactcctctgtcaggcgttcctgacctgccatattaatcagtttgttatagaaagtagtaaatactgtttcctcaatttcctttccatcaagaacataggaaattttttccacttctgcagtcccggtcttttcatcagaagtattttccgctgcatcttcattttctttatctgtatctgcagcagcttccccggtgtcaccggaaccctcttctttctcggatccggcgctttcttccgtactgtcttctgtattttttgcggtttctcttgtaacctgtacggtatgagctccgtcctcagactgaacttcaagactgtccagattattgacagtcagataatttactgtcagactgtaaaaatctgaaatattcttgtctacaatatctgtcagagaagtctctggtattgtatacacctgtttactgtcattgactttcacataacggtttccgtcaatctcatctcccacataaatcacaagctgcttttccacctggggcttttcttcagcttccccagagtcctctgcattgtcatcctctgatacgtccgttcccggctcttctgcttcttccttttctccggaagctgtatctgaatcctctgtactgtcttcctcagatacgtccgttcccggctcttctgcttcttccttttccccggaagctgtatctgaatcttctgtactgtcttcctcagatgcatctgcaccggtttcttccgcctctgatgctgtctccgccttatcttcatcctgagatgcctctgtaacgtccgtatctgcctctgcatcctcttctgcaagataagttgcggtaattattgcatacgggtcatcaaagccgtatttggcctgatctgtgcagttatagtctacaaagtccccgtaggtgagagaacctatggcagaggttactgttcccgccttggaggtatctgcctgctcagaggtttttccgtcagaaacataccagtacaggctgtcatcgtcctgagaaagctgataaccgttttctttttccacctttacgtctttgattgttgctgaggttactgccgggaagctttccgcctgcgcaaactcataggaagttcccataaacggttccagagatacagcggaaacaagataaatatctttgtcatcctctgactttttcagataatactgaccggaagcttcatttttcattcctacctgaagaatgatgcgatttccatcctcttccgtgagagtaatctgattctgaggtttgtccagatcatattcgctgagatccccgggattttcaagcttctggtctgctgacagcgctgtcagtgcatttaccgcgccgtcaagagtatcctgacttaccggaaaatccggctcgtctttttttacccacttgtctccatccttctcaaaaacctcttctgctccctctgtgccgttaaaagagacagaagtaattttttccgaatccatttctacgacgctgacactggtatctgctgcctcagcttctttttcttcctgggaatccacataggaggtaactcctatgtaggttcctgaaagaacagccagtacagcaactccggaaatcagttttactgtcttgctcttcattatgcttttctccttttcagccatacacagaatccaattacaaggaatactcccggaatcaggcccattgtacagattttccagaagcttacgtcataagcagtaggtgtgagagcggttacctgcagactcttggatggaatagaaactgtctctgcctcatcagagctgcacatccagttcagagattccatgatcagctgttcatttcctcctgctactgccgcattgatctggctgtccatcaggtttgccgtagaataataaataatctgcgtctgtttatcgtctttaagagtttctgtaatacttactcccaaatcaaagggacctgcaatatcttcttctgttttttccagggtttcactgtttagatccaccttggaatatgcgctgtcagaggttgtcagaatgctgtcaattgtcacagtatctcttacactgtccagtttacggataccctgtgcatatggcgcaagaacaaaatatccttctgatgcaaaaccggatacaggctctgcacttttcacttcaggaacaatataatacggcatctgcattgcatagtgctgtgcgtctccttcaataacaattccgtcagcccgctctacgccgtagttttccagaacagcgtcaaagttttccatggactcttctgtgtaatcagagaagatcattgcttttccgccgttttccagatattcaagaattgcatttttctcatcctcagaaatatctgttgccggtgaattgatcatcaggcaggcagtatcttccggcacgctttcttctgtaagaagattcagggagcggatttcaatatttgccttttcaatatcctcccggatggaagcgtccagatctttttctccatgtccgtccagtgtataaagaaccggcaggttttctgaggtcacgtaggaaatggcgctggtgatctggccttctccgtcaaatcctgtggtagtatagctgtaagtattataatccacagaagattcgtaaatctcgccataatccacaaccttgcttctttctccacattcaacgatcaggctgtttgaggaaacctctgcgtctgtatactctgaagtaaacttgggattgacaacaggatctttcttttctaccttaatatgatcagatgcttcctcatattttttcagaagcttgcttaccgtttcatcctcagctccgctctgagcgatctgataaatagttacgtccttatccagttttttaagaaaatcttccgtctgttttccaatgctgaaaagcttctgatcactgacatctatctcggaatattttgtcggcagagcattcacgatcatattgagcactataaagatcactataaagatcacactgatcagcatactgtaggaaccgtttttgatgtattttccgttaaaactggattttattttttctttaaaggattttttctctgagattcctttatttttcttttccggctgcttctttttcggtttttcttttaatttcactcttcccacctccttaattccaacgtctctttacaatggactgtacagtgagaaacatgcatactgcaatgacagaaaggaagtatacaattccattcacatcaaaaattccatttgcaaaattgtcaaaatgtccgcttatgttaaatatctgaagggctttctggatgccgcctgcaaaaaagctgctgttcaccacataaacaactgcaagagcagcctctccgatcaggcagatcactgcagaaatcaggaagtttttgatcattgtataaataatgatcgaagccgccagcatcagaagaccaaaggtaatgcaggtagacagagcgccttcagagaaaaaggaagagattccgttcatcataaaaaaggcaaacagaaatacaaaggtcagcactgccgcaataacctggctttctgtaagggaggaaataaacgcacctatggcaaggtttgcgcatcccagaagaaagaatccaaggattcctgtatatgcagttccaaaagatacggttccgaattttgacattaccagaggatacaggcagatgatcgccatgggaattgcaaagatggttaccagggcaaggtacttgcccataacgatctttcccacagaaacaggagccgtaagaagaagctggtctgttttctgttttcgttcctctgccagagtcctcatggtaagaatcggcacactgatcagaaatacaaaggtcagagcgcttagtgtatactcaaatctgggataagcagcatccagctgataggcagaaaaataaattcctgtcagtaaaagtataaaaaagataaacagatatccgatcattgaggtaagatagcttctcagctctcttttataaactgctgtcatgtttatccgcctcctctgtcatgttttctgattctctgatcacagcttctgcttcttcagctgtttgtatccggttatctgtgtcagatgaatcctttttattatcctctgtcagttcaaggaaaatctcctccagagaaatcttctgagactgcatttccagaatcggacaatgattttctgccattttaaagaatacttcttcacggatatccgcattttcttctgtggagacagtcacattccagccctcctggtctgattttttctctatggagatttcctttactccggaaatttcttccagaagctgacggatacggctcttttctccttttaccagaagattcagattgttggagcctgctgccagttttccaagattatcaggagtatcgcttgccacaagctttccgtgagaaatgatcagtacataatcgcagaccgcactgacctcagaaagaatatgagagcttaaaataaccgtatgcttttttttcagacttttgatcagatctctgatctctatgatctgcttcgggtcaagtcctacagttggctcgtccagtatgataacctccggataaccgagaattgcctgggcaagtcccaccctctgacgataacctttggaaagatttttgatcagacggtttttcatatctgtaattttcaccatatccatgacctcttcgatcatggcttttttcttgtcttttgggatttttttcagatccgctgcaaatttcatatattccagaacggtcatatcgaaataaagcggtggctgctcgggaagataaccgatgcatttttttgccttttccggctcctccagaatatcatgtccgtctatggttactgtaccttctgtagacgcgatatagccggtgatcatattcattgttgtagattttcctgcgccgtttggaccaagaaatccataaattttgcctttctctatctgaaaagaaaggtggtcaactgctgtatggtctccataccgtttgaccagattgctgacttcaatcactgaactctcctcctttttccctgattgtatggaaggcggactctgtgtttgtccgccttataaatattctatgaaaaagttgtgataaaagtaggggaattgtgtgatgattttgtgaaaccagttatacaagaggttctttcaaaggtgttcctgcttttcggggatattttcccggtgtggattttactttttcaatcactaccagagatctctggatctctgaatccggaagactgaaataaaccacatccctgatttttcctccaaggatttttactgctttttccgcctgctctgcctcttcctgaaccgttcccgacttataggaaataaagcttccgccaacctttacatagggcaggcagtattcagaaagagttgccagattggatactgctcttgatacgcaaagatcaaagctttctctgtaggctttgttttttgcatattcttctgctcttccgtgaacagccgtaatatctgtcagctttaagagatcaaaggtctcctccagaaagttcaccctttttttcagggaatccagaaggcaggcttccagatgaggaaatgcgatcttcagaggcactcccggaaatccggcccctgttcccacatccatcatacgttttactttttttatgtcaactgcttttacacaggcaagactgtccagaaaatgttttacaagcacctcctgaaattctgtaatccctgtcaggttcatgaccttgtttttttctacaagatactcataaaaatccacaaactgctgcctctgttccccgtccaggacaatgcccatttcctgacagccctgatccagtacacttaaatcgtatgccataatcttctccttatctgatttattgtctgccttttctgtactgttccagatatacaagcagtaccgatacgtctgccggtgaaacaccggaaatcctggatgcctgtccaatggaaaccggtctgtaggcttccagcttctgtcttgcctcaatacgaaggcttccaaccttttcgtaatcaagatcctcaggaatcttttttgtttccagctttttaaactgttccacctgtttcatctggcgtttaatataaccgtcatatttcaggttgatctctacctgctgtttgacatcccacggaagctcaggtctttctttatcaacagcagccagatcgtcatacgtaagctcaggccttctgatcagctctgcaagcgttgttccggacttcagaagagtgcttcctttttcctcaagaagcttctgaacctcaggcgttcctccaatagtcacatgttcggttctttttatttctgcctctattgccttttctttgtccagtgttttctgccaggtttcctcctggatcagcccggcttcatagccctttctgcgaagtctgaggtctgcgttgtcctgtctgagaagcagcctgtactctgcacggcttgtcatcatccggtaaggctcatggttttcttttgttacaaggtcatcaataagaacacctatatacgcctctgagcgatccagaaccagcatttctttccctttcagcttcagcgctgcattaatgcctgcaatcagtccctgggctgccgcttcctcatatccggagcttccgttaaactgccccgcgctgaacaggccttttatattcttaaattccagtgtaggataaagctgccggggattgatgcagtcgtattcaatagcataggcattttttacgatctttgcattttccagtccgggaacagaatgatacatggcatcctgaacgtcctcaggaagagaactggacattcctcccacgtacatttcatttgtataaagtccttccggctcaataaatacctgatggcggtttttatcagcaaagcgtactaccttgtcctcaatagacgggcagtatctgggtcctgttccctcgatcgtaccggaataaaggggtgaacggtccagattgttccggatgatctcatgagttttttcatttgtgtaggtcagccagcaggatttctgcggaatctgtacagcttccggatctgtggaaaaagaaaacggcacaactctttcatctccaaactgctcttccatttttgaataatcaatggtatttcctgcaatacgggccggtgttcctgtcttaaaccggaacatttccactccaagctctttcagcgaatctgtcaggtaatttgctgcctgcagaccgttaggaccagtatagtcactgacatctccgtaaatgcagcgggatttcagataagttcctgtacacaggattaccgcacggcagtggtaaacagcgcctgagtaaagctccacacctgtaatccggttctcctctgtaagaagtcgggttacttctccctgtcttatggtcagatgctcctgattttccagtgttttacgcatttcattgctgtaagcctgtttatctgcctgcgctctcagtgaatgaaccgctggtccctttgatttattcagcatttttgactgaataaaggtcttgtcaatattctttcccatttcgccgccaagagcatccacctctcttaccagatgccccttggagcttcctccgatatttgggttacagggcataagggcaatgctgtccacacttactgtaaacattactgtctcaaatccaagtcttgccgctgccagggctgcttcacagcctgcgtgccctgcccccacaacaacaatgtcacaatttttttccaacctctttgcgcacattcctctgtcctccatctattttcctacacagaacttgctgaatatctcatttaccagatcttcgcccagggattcgcccataatctttccaaggctttcgtaagctcccatcagatcaatggaaaagaaatcctccggcattcctgcttcaatactttccattaccatgttaaggcttctctccgcctcttccagggcagtcttatgacgtgcatttgtaatataaacctcatcattaaaggaaatctccccgcggaaaaacatttctttaatggctgtttccaggttttctattcctgatccttccaccactgacacaggtatcacctgttttcctgttttttcttccagatgctgaggcgaaaccaccggagtcagatctgttttattataaataataatactttttcttccatgaagcagctccatgatctcttcatcgtttttatcaagaggcttggaagaatctaccacataaaggatcaggtctgctttttcagccatctgtctggccttttccacaccaattttttctacaatatcttctgtctctctgatgccggctgtatcaatgatccttaaactgattccatgaagagaaatatattcctccagcgtatctcttgtggttcctgcaatttctgttacaattgcccgatcctctcctacaagaaaatttaacagagaggattttcctgcatttggttttcccaggataactgtgcggataccctcctggatcatttttccgtcatcagcagacttcagaagctttttcacctcttctgcctcttcctttaccacttccatcagttcatccggatacccctccagatcaaaatgctccggatcatcaagcgcggtttctatatacgcaatatgatgaagaagctttgccctgatttcccggatcacccggagaaccgatcccttcagctgctctacagagcttttcaacgctatgtcgctttttgcctgaatcacatccataacagcctcagcctgagaaagatccagtctcccgttcagaaaagcacgttttgtaaattctccgggttccgctacctgcgctccgtttttcagaacagtttccagaaccttcttcatggcaaaaacaccgccgtgacagtcaatttctaccgtgtcttctcctgtatatgtttttggaccgcgcattaccattaccagaacttcatctaccgtttcctctccatcgcagatatatccataatgaatggtatgagtttttacttcttttatatttttctttccattctttgaccggtaaatcctggaaatcacattcattgcatcttctccgctgatccggacgattccgatgccggaagcgctcattgctgtggaaattgctgcaatcgttgtctccatctgcaatcctcctgtttgtatgcataaattaaactgtgttttctggtataaaatagatctctttctcatacctgtttataaaaaatatacactgacatttttattagtgtatccatatatccttcaaaaacctttacataaaaaaatgttactccgggaaaaagcctacgtcaagtccgtattattcacgctttcacccagaataacatttttgttcagatgtatctcatcttaatatcttttcagttttacaactacatgacggtaaggctcttcaccttcactgacagtctctacaaatttatttccctgaagagcagaatggatgattcttctttcataaggattcattggttcaagaacaaccggttttctggttttctttaccttgtaggcaattcctcttgccagattttccagtgtctcttttcttcttctgcggtaatcttctgtatccagttttacccggatataggtagatttacctttattcacaacaagacttgtcagatactgaagagaatcaagggtctgtcctctttttccaatcagaattcccatatcctgtccctcaaaatcaacctccagacagccgtcctttgtattgtattttgaagtgatctgaacctcgcccagttccatggaagaaaatacttctctgagaaatacaagcgctctctcttcgatttctttgatttcctccggatcagaaagtacctcgatctctctggactgttttacaggtttttctttctgaaccttttccttaggctctcttacaggcttttctttaaaggtcttttcctttaccggcttcggctgcctgtcttttacagactctttttcctctgctgcaggctcttccctcttttcagccttatgagaaggtctggaatgctgtttcggtgcctttttctcttccttaaaggattcaatttttactgaatctacaattttttcgatttctgcttcctcggaagaaacttcaagcttacgtactttaatgatagccggcttgcttccaaatccaaagaaacctgtacttccctcagtaatcacctgaatgtccaactgatcactggatacgcccagttcaatacacgcttttgtaattgcttcatttttcgtttttgcagaaaactgaacatactcattcatgatgaacccctccgttccttcctatttcttcttatttctttcgtcaaaggttcttaccagatttgcttttgctgtaatactgtccggttttgcagctgctgcctttttgtaggattcctcaacctttttcgcacgctctgcttccggtgaaccactgtttcctttttctaccttgttgatattttttacactctgatgtgcctgattagtgatcttctgaggcggaagtccggcttttgccctcttctcttctattttcttcatgttttcattaatcagaacttcaatatccatcttgttcagatgacggttaataagaacctgctggacgcttcttacaacagcactggaaatccagtaaataccaagacctaccgggaatgtgaagcagaaaaatgctgacataagaggcattaccatgttcatggtcttcatggaacttgccatgggatttgcgccatcatcattctgagcagcctgcggcatcagcttcaggttcagcacctgagttccccaggaaagaatcgggataagaagcgctgcgattgcaagaagaatggatccgcctgcaacaactgctgtgatatagttccatggcatatctgcaatgttcagccccagaaagctctgcatgtgggaaatctcagatgcagtactgttaatcgcatcagaaaatcctgcaaactggctcatatcgcccagtttatcccactgtgccggagaaagagcatacaaaaagtcaatgacagaatttgaggttgcggtttctccctcaagaatcaaacgaacacgggtcattttattatcagtgataaagtcctgaaggatattcgtatatccgctgacaccgataatctgagaagcaactccgtcaagaacactttttacactgcctacataggcaggaatattctggattacgtgccacagagaccacaggatcggcagctggatcaaaagctgaacacagcttccggtaggtgatactccgtatttctggtaaactgctgaggtttcttcctgcattttctgcatggaaacctgatcttttttattctgatattttttctggatcttcatcagctccggctgcataactgaactcagttttgagaacttctgctgcttgatctgaagaggagtcataaaaagatagatcagaatactgaaaataatgatacaaagaccgagattctggattccgaacaatccgtcaaggaatttgtagataccgttcataatccagcccataacaacagagatctggccaatgatcggcgtcgagttctttgtagctaaaatcatcaattccaattttcatttcctcctgattatggcacaggatcatatcctccgtgagaaaaaggattacaccttaaaattctccagagggcaagcaatccacccttgatcgcgccatatttttggattgcttccaaaccatactgagaacatgtgggaatataagggcattttgttctcttcatcggtgataaatatttttgataaagccgtatcagtttaatcagaatattcttcatttttcttttcacctgttatatgatgctttccggccagatgcagcagagcgctttctatttcctgatagctttttccctttgcagatgctctggcaattactacaatatccaggccgttacaaaataacggttcatttaaacgataactttcccttatcaatctggtgattctgtggcggaccacactgtttcctacttttttacttactgatattcccagacgattcttcatgtactgattttccagtacgtacatcaccagataccgatttgcctttgatgttccatgtctgtaaacctgctgaaaatctttgcttttctttaaggactctgaatatttcatctggtcctccttcaattcttattcttacagaaataatcctgtatagaagaaaagaccacaatactgcggtcttatgtctgatcttatgctgataactgctttcttccttttaatcttcttgcagctaatactttacggccgccttttgtgctcatgcgggctctgaatccgtgaactttagctcttgatctcttctttggctgaaatgtcattttcataggtaaagcacctcctttatctattatccaatttaaaaattttcatagaacatcatttcaattatattcataaaccccctgttcgtcaagctaaaaataagatttttatacaaatggactgcttattatcaggtttgaaagtttctcttacttccggttgtttagaatcaacatctatatgtggaaatcttcagtttacgtaatgttatccacattttgtggataacttgtggataactctgaggataccctaaaaaatgtccacatttttcgacttatttttacacattatgtttaaaaatccctttattttacaaggattattacgtggacaactttatacacaatccccatgggtatttatccactatttccggttttatgtaaacttaaaggggattttccacatctctcacattatccacatgtggaaaaatgtgtataactacaattattcaaataaggattgcgtaaaacctttatttattataatatatataaggatatttatgtctttcagacttaatataaacaaaaaaacacctgaaaccaggaaccgggagagtgaaaatggataaagttatagaaaaatgggatgaaatccttcaaatcgtgaaagttgaatatgatgttgcgaacgttgccttcaatacatggctgaagcctttgaaagtatacgaggtaagggacaacgttgtcacgatcctcgttccttctgaacagagtgttctattagatattgtaaataaaaaatacagactgcctcttcaggttacaatctgcgaggttacgggaatggaaagctgtgaaatccagtttattcttccggaaaatgtcccgaaaaaagaaattccttcctataatatgtctgaatccaaatctcttcgcgatcaaagatgtgaggaagctcatctgaatccaaaatatacttttgacagctttattgtaggaagcaacaataaatttgcccaggcagcagctcttgcagttgcggaatctccgggagatacttataatcctctttttatttacggaggcgccggactgggaaaaactcacctgatgcattccattgcgcattatattattgacaataatgaaaacagtaaggttctttatgtaacaagtgaagaatttaccaatgaactgatcgagacgatccgaaacggaaataattcagcaatgtccaaattccgtgaaaaatacaggaatattgacgttcttcttgttgacgatatccagtttattataggaaaagagtccacacaggaagaatttttccataccttcaacagtctccacagcgccaaaaaacagattatcatatcttctgataaacctccgaaagatatggaaattctggaggaacgcttccgttcccggttcgagtggggtctgatcgcagatattacactgccggattatgaaacccgaatggcaattcttcataaaaaggaagaactggacggctataatatcagcgaagaggttataaaatacatagccaccaatataaaatcaaatatccgtgagctggaaggcgcctttaataaagtaatggcaagttccaagcttgaaaaaaaggaagtcactttggaacttgctgaaaaagcgctgaaagatatcatttcaccggaccagcagaaggagatcacgccggaatacattatttctgtagtggcagagcactatcatgtgacaacagcagacctctgcggaaacaaaagaagctcaaaaatagttatgccgagacagattgccatgtatttatgcagggatatcattgatacatcactgaaaaccattggaaaaaatctcggaaaccgcgatcacactacagttatgcatggaattgaaaaaattgagaaagaacttcagacaaatgacaacctgaaaaattccattgacaccctcaggaagaaaattaatccacagggataattactttatccacatatgaaacccggggttttacacgaagttatacagtttgaaagtcttgatttttaaggtttttttggactttttcacatattcacagcccctaaggcggctaatacggattttttcttatttatttttttaaaaagccattttcaaacaggaagggagttatacacaacatgaaaattatctgttccaaaacaattttattaaaaagcgttaatatctctttgaaagctgttccttctaaaacaacaatgccgattctggaatgtattctgatcgatgcctcaacaaaccagatcaaatttactacaaatgatatggaactgggaattgaaacaattgttgacggaacaattgctgaaaaaggaatggttgctcttgatgcaaaaattttctatgagatcatcagaagacttcctgataatgacgtgaccatccatacagatgaaaattatgtagcaacgatcacctgtgaaaaagcaaaatttacaattccgggaaaaacaggagaagattttgcctaccttcctgttattgaacgggatgaatctcttactctttcacagtttacattaaaagaaatgatccgccaaactctgttttctattgctgtaaacgaaaataaccggttaatgacaggtgaactttttgagataaagaataattgtctgaaaatagtgtctctggacggccatcgtatatccattagacgcatgcctcttaagagagaatattctgacaaaaagattgtcgttcctggaaagacacttagtgagatcagcaaaatcctttccggtgaggttgatgatcaggtaagcatttattttacaaaaaaccatatattgtttgagtttgatcagaccatggtggtatcaagactgattgagggagaatacttccgcattgatcagatgctttccagtgattatgataccaagctgtctgtaaataaaaaagaatttctgaactgtattgaccgcgccacacttcttgtaagagaaggggataaaaaaccgatcgtcattgatatcagagataataaaatggagcttaaaattgattcttccatgggatccatgaatgaagagatcgatattgagaaagaaggaaaggatattctcatcggatttaacccgaaattcctgatcgatgctttgaaagttattgatgatgaaaatattcatatgtaccttatgaatcccaaggctccatgttttatcagagatgatgaggagacatacacctatctgatcctgcctgtaaatatcagccagaatcaggcaagataaaggaggatcattgtggaaatcaaaatcagagatgaatttatcaagctgggacaggctttgaaacttgcaggagttgtagaagacggagttgaggcaaagtttgtcattcaggacgggcttgttaaagtgaacggtgaagttgacgaacgtcgcggcagaaaagtgtatgaaggggatgtgatctcctttaacggacaggatataaaagtgatcaggtagattatgtatatagagtctgtacaattaaaaaatttcaggaattatgaaacccttgagctgaatcttgacagggaaacaaatattttttacggggataatgcacagggaaaaacaaatattctggaatctgtatatctttgtgggacaacaaagtctcataagggaagtaaggacagagagatgatccgtttcggtcaggaggatgctcacatccggatgatggtaaaaaaggatggtctttcttacaagctggacatgcatcttcggaaaaacaaggcaaaaggagctgcagtcaacgggcttccggttaaaaaagcaagagagctttttggaattgtaaatcttgtatttttttcgccggaggatcttaatattattaaaaacggtcctggtgaaagaagaagatttctggatctggagctgtgtcagctggatcagatctatctgtctgatctggccggatataatcatattgtaaaccagagaaaccgtcttctgaaggatatgtatgcgaatccatctttgaaagatacgctggaagtgtgggataagcagatgatacagtacggcagaaagctgattcgcaaacgccagacttttgtggaagagttaaatgagatcatttgtgatattcacaaaaatcttaccggcggtgaagagcttcttcaggttatttatgaaccaagcgcacaggaagaggattttgaggagctgcttttcagaaacagggacagggatatccggatgaaaatgacctcttcaggacctcacagagatgatctctgttttctggtaaatggtattgatatcaggaaatacggatcgcagggacagcagaggacagccgctctgtctttgaaactttcggaaatatatcttgtaaagaaaaaaatcggagatacgcctgtgcttcttctggatgatgtactttcagagttggacagcagccgtcagacgtatcttctggacagtatccatgatattcagacattgatcacctgtacaggcctggatgattttgtgaaccatcagtttcacattaataaagtattcagggttgtaaagggtgaagtttttaatccagtaaaaaaagtgaactgtaaacagcagtaatttttccccggaatttattttttccggggaaagttctttgacaagcataaatgcatatgttaaacttgttttaattatggaaagttggtgaatgtatattggataaagaggaatttcgaataaaagtgagccgtattgacaaccttgtagctcagaaaaaatacaaggaagcagttgaggttgttgagagcattgactggcgcagagtaaaaaatgttcataatctgtgcgtggttggtgagatttatgctgcaaataagagatatgaggaaagtaaggagatttttcttctggcatatcatcgggcgcctatcggtaaaaatattttgtacaggctgatcgaggtatctttgaaaatgcaggatatcgaggaagcggaagagttttatgaggaatatctggaggttgctcccaatgacaatacccagtatattctcaaatataagatcagcaaagcgaaacaggtgtctctggacgagcagatccgtattctggaagaatataaggaacgtgagtttacagagagatggtcctatgaactggcaaagctgtactaccagaaaggcgatatgaaaaaatgcctggaaatgtgcaacgatatcattctctggttcagcgaaggccgttatgtgctgaaagcaatggatctgaaaaaccggatgggacagcttaccgggaaagaaagagagcagtatgagaaacagtttattccgaatctgacaactgttgatcagatgactcagtcaggggaagcccgggaaaccggttctgatgcagagaacaaatatgaggctcttccggatgaagattctcctgtgattgaaagtgttcgcattgatgagagagatgtaaacagtgcggaaagccttcaggaaaaaatttccaaaggcatccgggatatttttaacggcaaaaagaaagaagaggactttacaaaagaggaagaagaccttcaggaagaaatgctcagggatcgtttttctgaaaaggaacataaaaacgttccggagctggaaccggaagaagtttctgttcttcaggaagaagaaaatatttctcaggacagctttgctgagacggaagaagctgaggaaccggaaattgatgtaaatgagatatttgaagatttttccgatcagacagtttcacgcctggaggaggaagagacactttctgacagcagtacagagcttcctcagcttgaaattccggaatccatgaaaaatatagatctggaaagtgatattatgccggaaattcccaaggctccggaagtggttctgccaggagcagaaaagaacgagacggaagcagaaatcgattttgactttaatctggaagacatgatcctttcagcagcaactgcccagggaattgaaattccggatgatgaaccgaaggcggaggacgttcatgcagcagatcctgacgatgaagattatatgacagaagaggatcttcggagagcagaagaggaattccttaatggtccggctggaagaaaagatcacaaagatccggaggagcttctggaagaagagtttggagaagcagatgagttttatgaagatgcttctgatgatgaggacgatgatttctacggcgatgaatatgatgacggggacgatgatttttacggggaagaatctgacgatgaggacgatgatttctacgaagatgagtctgatgacggagatgacttctacgaagagtttgatgacgacgacttttacggagaagaatccgacgacgaggaagatgatttttatgaagaagaaccggaagagcttcctgtcgtaagccgtaatcctatttcaaaaaataaatctgcaaaaataatttcagaagagaagaatgcagagatccgaaaaccggatccggacagaaaaacagtatttaaagaagagccggcaggacagaaggctcctcggaagaagaaaaatgtccgtctgagtcaggctgaggaactggaacggtttgttgataccatccgtcctcaggaggcaatggatattattcccagggagaaaactcttacagacagcgagaaaaaactgtttacatattttgcaagagtacctgggctgagagagcagcttgtagacgcgctttgcgacgttcagatggctgctgctgacaaaacgtccagaaccggaaacattattgttatgggcggaagagagacaggaaaaacaagactgatctcaggactgattcctgcaatatgcaaggaactgaatcttgaagccgccaaggttgcctatgtatttgcagagcagatcaatggcaaaaatattcctgcaatcgtcaaaaagatggcaggtggtttccttgtaattgaaaatgcaaaccagcttaaaaaagaaaccgtaaatcagttaagcaaggcaatggatttccgcacagacggaatgatcgtgattctggaagacgaaaagatcggaatgagaaagctgatggcaagattcccgaaatttacgtccaaatttacatctatgatcaatatcccggtatttaccaatgatgagcttgtaaactttgcaatggtttatacaagagaacggggttatacgattgatcagcaggcaatgttggtactttacaatctgatcagtgtgaatcagaaagaagatatgcctatgaacgtaggcgctgtaaaggaaatcattgataatgccattgcaaaatctaccggcggaatccgtaaactgagcagaaatatttccaagaagagaacagatatggacggatatacagttctctacgaaaaggattttaagtaacataaaaaataaataacggaaaaggaagtaaagattatgaccagaccttatcttggaaatcccaaatacacgattgaagttcttcagaagtatggatttgtttttcagaaaaggtttggtcaaaattttttgatcgatactcatgttctggaaaaaatcattcgggcatctgaaataacaaaagatgattttgtactggaaataggaccgggaatcggaactatgacacagtatctggcagactctgccagagcagtcacggcagtggagatcgacgatgctctgatccccatactgcaggatactctgaaggactgggataatgtaaatattattcacggggatatcctgaaaacagatattcagaagatagcagatgaaaaaaatcagggaaaggcgatcaaggtagttgcaaatctgccctattatattacaacaccgatcattatgggactgtttgagagccatgttccggtagaatccataacagtaatggttcagaaagaagtggcagaccgtatgcagacaggtccggggtcaaaggattacggggcgttgtctctggccgttcagtattatgcggaaccggagattgtagcaaatgtgccgcccaactgttttatgccaagaccaaaggtgggaagcgccgtgatccgcctgaaaagacacaaagagccgcctgttcaggtgcagaatgaaaagctgatgttccggcttattcgcgcatcttttaaccagagaagaaaaacaatggccaatgggctgaaaaattcccaggaactgaattatacaaaagaacaggttgagagcgcgatcagcgcctgcgggcttcctctgaatatcagaggagaagctctgagtctggagcagtttgccgctctgacaaatgcattttgctgtacggcatcccggtgatgccgccacagcagagaatggactgtatgacagaaaaaaagagtatgtaaaaagcatccggtggctggtcggatgctttttacttgaagatttattaaatttaaaaggaaggagagttgaatacctttacaggtatccaacatatgaaaaagaaaattataaaaataatgttggctgtattatttttatgtgaatagtatatctgtaaaatatgagagtttcatgtttaagatatgaaaaaataatgaacgaatatagaaagatttatgaatgacagatctgatctgaaagaagggaaaatgttcataaacatattacagcgcaggtttgaaagtgtgatataatagcagatgtcagaaaaaagatgatatttccaaaggtcattgggaagacattttgccaggctgccggcaacggggcgtaaggtatttctgatataattgcaggaaaacagcaatggttttccagaacatggtttcagacaaaacggaggtaataaaaatgaaaataaaaaaattaagtgcatggattcttgcaggagcgcttacatgtacagcgcctgctgtcgtatccgcggatactgcaacagatgctgcggtagatcaggcagtggaccttttgaaggagagcggaataggagatcttctctctgatccggataaggtggttgacattatcatatctgcaatggattcagttggacaggcagatgttactgacgaagagatttcttctgcgattgacaccgcagcacaggcagccggttttacgttgtcagattctgaaaaaagcactctggtaagtctttataacaagtttaaaaatatggatcttgatgaagaacagctgagggagcaggtccataaggtatatgataagctggagagtctgggagttaccaaagaggatgttaagagtattttcggaaaactggtagatatggtaaaagatatcctgaattgacaacaggttgcagacaatttggatataaagataaataaattatgtatattacacaacattaatttggtaaagcaaagaagaatatgtagtatttttataaaaaacagaggaatataagaaaaaatattgtgcaaatacacgaaagattcactgtttgttcatagaaagttcataaaagattgctatgataagaacagttcgaaagaacaatgttatgacgttgtaatgttcttcattacacataaattttttcataataattgccccggtaaaccactgccggggcactcctcgtttatagagctccctgaatcagggagcttttttgctgttaagctgtaaataggttgtaggtcagaaaccccgtatggtataataggaacacttaatgaatccgggtcggagacacaggatgaatttcgtgaggaaatatgactggacacttaacgaggttcagtgatgcgaatgccgggttttgaacctgcggtatcatatgacataaataaaagctgctgcacagttctgacagaggacgcaggaaaataatagcaggaaagggagtagtatattatggctgaaacaatgaaagattacgaaaaagagctgaatgagtctatgaaaaaaatagaagaaggggacattcttaccggaacagtagtaagtgtggacgaaaaggaagtgatccttgatctgaaatattatgcggagggtgtgattccggctgaagactataccagagagccgggatttaatctgaaagaggaagttcatccgggagacgaggtttctgccacggttgtccgtaaagatgacggaaacggcaatattcttctttccagggttgaggcggcagatgtgctcgcatgggaaaaaatccgggaatataaagaatcaggagaagctcttgacgttacagtaaagggaatcaccaatgcaggcgtcattgcgtatgtggaaggtgtacggggatttattccggcttcaagactttctcttggatatgtggaggatacagaggaatatctgaaccgtcagatacgggttcaggtgatcgagtgtgacaaagacagtaaaaagctgattctttctgcaagagaacttctgagagagcaggcagaggaagagagaaagaaaaaaatttcaaatgttcaggtgggactggtaacagaaggaacggtagaaagcctccagccatacggagcttttgtggatcttgggaacggtctttccggtcttgttcatatttcccagatctgcgagaaaagaatcaaaaagccctctgaggttctttctgtgggagacagagtaaaggttaaggtaactgctgtaaaggatggaaaattaagtctcagcataaaagaggcatctgatatgatggcaaaagacattgaggaagaggtctatgaggttccggatgcaggtgaggaagcaactacctctcttggatcattatttgcaggaatcaaactggactgagtatcgcaaagaaatacagtatcagttgaagaaagaggcagtgaggaggaatttatgagaaaacaggataagatttttgtgatcggacataaaaacccggacacggattctatctgttctgccattgcgtattgtgatataaaaaacagaacatttcagaacaaaagatatgttcccaaacgcgcaggccagataaatgaggaaactgagtatgtgctgaaccgtttcgggatccagcctccgggatatctgagtaatatcggaactcaggtcaaggatatggatatccgcatgagcccggaagcagataagagtatgtcattaaagaatgcatgggatctgatgcaggaaaacagcattgtttctctgccgatcagagataaagagggctgtctggagggcctgatcaccattggagatattgcccagacatatatggacacaacagacagttatcttctgtcacgggcaagaacccagtacagacgtattgcggaaaccattggcggcagtgtgatcgaaggaaatgaacacggatattttacagaaggaaaggttatggtgggaactgctgacccggacaagctgagagagtacgtgcgggagaatgatatgatcattctcggaaacagagaagaggatcatctgcaggccattgaaatgaatgtgagctgtattattgtgggaatggatatccaggtaacagaaaacgtcctgaagcttgctcatgaaaaggatattgtggtgatctcttccccatatgatacgtttacaatatcaagactgatcaatcaaagtattcctgtgagatatatcatgaaaacagaaaatctggtaaccttccacacagaggattttacagatgatattcaggatgtgatgatcaagcatcgtcaccgggcattcccggtaattgacaaaaagggaaaatgtgtgggtacgatctcccgccgtaattttcttgatatgcataagaaaaaggtggttctggtcgatcataatgaaaaggatcaggctgttgataatattgaaaaagcggagatccttgaaattatcgaccatcataagctggggacgcttcagacaatgcagccggtcagcttccggaatcagccggtaggatgtacgggaacgattatgtatcagatctatggagaacagaaactggagattccgcctaaaatcgcaggacttctctgcgcggccattatttctgacactctgatgttccgttctcctacctgtactcttcaggataaaatggcagcaggagctcttgcgctgatcgcagatatttccatagaggaatttgcaaaggaaatgtttaaggcaggaagcaatctgaaggacaagtcgccggaagaaatcttttatcaggattataagaaatttattgcagagggtgacgttacctttggcgtgggccagatcagttctatggacgaggacgagcttaaggtgataaaagaacgtctggaaccgtttatggtaagtgaatgcggccgtcatggagtttccagggtctactttatgcttacaagtattatgaaccgttctacagagcttctgttttatggcgaaggcagtaaagagatggcggagagcgcttttagcatggaggcggacaatggttctctgtatctgaaaggtgtggtttccagaaagaaacagcttattcctgcattaatggaagctgcgcagatgcagaacgagtacgcataggttcaggagggatttttatgtcgaaacagagctggaagccgggaaatatgctttaccctcttcctgttgtaatggtaagcgcagcagataaagagggcagagatgatattataacagtggcatgggccggaactgtgtgtaccaatcctcccatggtatccatatccattcgtccggagcgttactcttatcacatgatccgtgaaacaggagagtttgtgattaatctgactactgaggagctggcatttgccacagattactgcggagtaaaatccggaagagatgttgataaatttaaggagacaggactgacaagggaaaaggcagaaaaggtaaaagtgccgatgatagcagaagcccctgtttctattgaatgcaaggtaaaagaaatccgggaacttggatctcatcacatgtttatcgcccaggttgcagcagttcacgcagatgaaaaatatatggatgagaagaaccggtttgatttaaacagagccagacctattgtgtattcacatggggagtatctgggaacaggaaagaaactggggacttttggttacagtgtgaaaaaagcaaaaaaacaggctaaaaaacgctgaaaaatggaaaaaaagtgcaaattttccgggggattgcagaaaagggctttttatggtaaaataaaatccggttatttgcagataataagatagacagagatgtctggaggatatatgaataacattacattgataggaatgccgggagtggggaagagcaccatcggtgttgttcttgcaaaggtattgggctatcagttccttgactctgatcttctgatacagaagcaggaaaaaaggaagctccatcagatcatagctcaggagggaaatgatggatttcaggcaatagaaaatcgtgtcaatgcttctattgaggcggaggagacggtgatcgccacagggggaagcgtggtttactgccaggaggcaatggagcatctgaagtctgttggaacagtagtctatctgaaactgtcgctgaacgaactgtcaaagcggcttgggaaccttaagggaagaggagttgtcctgaaggaaggacagacgctggcagatctgtacagagaacgcacacctctgtacgaaaaatatgcggatattgtgatcgatcaggaaggacaggatctggaaacatgtctgcaggcagttttggaaacactggaaaagcaaaaaagtaactgttgaagcagaggaaagagcagaagcaggcacagatacttaactttttatttacaaatgttaaaaatatgttataatacgatattgaacattttaatatattaacatttttcggatatgataagtcatttctgggttactgtgaacaaagtgaacagtaacatttctggtgtttgcttcggcttacggagtgaaaataattcatagaggtgttttatggaacagtatgtaattaaaggaggcaatccgttagtaggtgaagttgagatcggcggagccaaaaacgcagcccttgcaatactttctgctgcaatcatgacggatgaaaccatattaatcgaaaatctgcctgacgtaagagacatcaatgttttgctggaagcaattgccgggatcggagcccaggtagaacgaatcaacagatctacagtaaagatcaatggttctaccattgccgatatcagcgttgattatgaatacattaaaaaaatccgcgcatcctattatcttctgggcgcgctgcttggaaaatataaacatgcggaggtgccgcttccgggcggatgcaatatcggaagccgtcccattgaccagcatctgaagggcttccgggctctgggagcagatgtaaagattcttcatggggcgattatggcaagtgcggaaaatcttcacggaagccatattttcctggatgttgtgtctgttggcgcaaccatcaacattatgatggcagcatctatggctccgggacgcacgattatcgaaaatgcggccagagagcctcatgtagttgatgtagctaacttcctgaacagcatgggagccaacattaagggagccggaacagacgttatccgcataaaaggtgtggagaagcttcaccgcacagaatattcgattattcctgatcagatcgaggcaggaacctttatgtttgcggcggctgctacaggcggagacattacagtaaaaaatgtaattcccaagcatctggaagcaaccactgcaaagctggaagagattggctgtgaagtggaggaatttgacgatgcagttcgcgtccgtgcaggaaggagactgcacagaactcatgtaaaaacacttccctatccgggatatcctactgatatgcagccgcagattgctgtaaccctggctcttgcagagggaacaagtattgttacagagagtatttttgaaaaccggttcaaatatgcggacgagctttccagaatgggagcaaacatcaaggtagaaggaaattctgcgatcattgatggagtacgtaagcttacaggtgcaagagtcagcgcaccggatctccgagcaggagcagctcttgtaattgcaggtctggcagcagacggcgtaacggttgtagatgatatcgtttatatccagagaggctatgagaattttgaagagaagctgagaagccttggcgcagagatcgagagagtttccagtgaaaaggaaatccagaaattccgtcttcgtgtaggataatccggaaatctcatatattttttcttgacaaacggaaaaaatgagtatattgtatgattgttacaaatcaaatagagaacggccttttattcagagtggtggagatacaaaggatctgtgaagccacggcaacccctctattgaggaaggtgccagcctgagcgagtgatcgaacaataagaggattgaaagataaattcagacagtccgattattcgggctgtctcttttgtttaccaatacccgtaacaataagttttcgggtcgttatgaagaaaggaaaaacacaatggaaaaaattttatttacttccgaatctgttactgaaggccatccggacaaaatgtgcgacgctatttccgatgccattcttgacgctctgatcgagcaggatccaatgagccgtgttgcctgcgaaacagcgactacaacaggccttgttcttgttatgggagagatcacaacaaacggatatgttgatattcagaagatcgtaagagatactgtaagagagattggatatacccgcggcaaatatggatttgacgcagatacctgcgcagttatcactgctattgacgagcagtctgcagatattgcccttggcgttgacaaggctctggaagcaaaaatgggcgaggatgagatcgatgccattggtgcaggggatcagggtatccagttcggatatgcttccaatgaaactgaggaatatatgccgtatgccatcaatatggctcacaagcttgcccgtcagcttaccaagatccgtaaggacggaaccctgagctatttaagacctgacggaaaaacacaggttactgtggagtataacgaggaaggcaagccggtacgtattgacgcagttgtatgctctactcagcatgatccggaggttactcaggagcagatccatgaggatatcaaaaaatacgtatttgacgctattattccggcagatatggttgatgaaaacacaaaatatttcatcaatcctacaggacgttttgtgatcggcggacctcacggagacagcgggcttacaggacgtaagatcatcgttgacagctacggcggatacggacgtcacggcggcggcgctttttccggaaaagactgtacaaaggtagaccgttctgcggcatacgcagcacgttatgttgcgaaaaatattgtagcggcaggtctggcagataaatgtgaaatccagctttcctacgctatcggtgtggcacagcctacttccattaacgtggaaaccttcggtacaggaaaactttctgatacaaagcttgttgagatcattcgtgaaaactttgatcttcgtccggcaggaatcatccgtatgctggatttaagaagaccgatctacaaacagacagcagcttacggacactttggacgtacagatgtagagcttccatgggagaaactggataaagtggatgatctgaaaaaatatcttgcctaaaatgattttatagaaaatttagacatagaaatctggcaatgtgatataatgaacgcacaggcggtaatgcgattttactgcccgtgcgtttttatattccatagaaaatcaggactacagattgttctggcagtgcggagaacgggagatgcagattattcggactgggcggaacagggaggtttcatgaaattacagacaagaattatggttggcttttttatgatcattctggtacctcttcttttgtttgccgccacacttcacggaatgcgggaagcgcagataagaggaccaaaaaaggcagaaacagccgaaacagcatcgtcagagtatgattatgactatgggatcaccattgcggattcagaaacatcacaggacgggatccagattatgacaaaggatctttttgtttctgcactggtgatacttgtatttaccagcttatctgtggggctttggatttacaggagtattgccactcctcttgtgaagctgcgcaaggcaaccagaaatattaaggatggaaatctggattttgttctggatgtggaaggaacagatgaattttccgagctgtgccgggattttgaagaaatgcggcggcgactgaaggaatccgcagaggaaaagatcattctggataaggaaaacaaggagctgatcagtaatatttcccatgatcttaaaacacctatcacggcagtaaagggatatgtggaagggattatggacggagttgcggatactcctgaaaaaatggaccgttatgtaagaaccatttataataaaacaaatgaaatggatcatctgatcaatgagcttacgttttattccaagattgacaccaacaggatcccgtatacgttcagtaaactgaacgtggaggattatttttctgactgtgcagaggaaatcggtctggagctggaaacaagaggaatacagctctgctatgccaattatgttgacagaagcgtacaggtgattgctgacggagagcagatccggcgggtgatccataacattatcggaaatgcgatcaaatatatggacaaggcaaagggcgtgatccagatccgggtaaaggatgtgggggatttcgttcaggtagagatcgaggacaatggaaaaggaatcgcctccaaggatctggcttatatttttgaccgtttttacaggacagatgtttcgagaaattcttccaagggaggaagcggaatcggactttctattgtaaaaaagatcatggaggatcatggaggaaaggtgtgggccaccagccgtgagggaatcggaaccattatgtattttgttttaagaaaatatcaggaggtaccaatgaaatgagtaaaatactgatcattgaagatgaagaggctatcgcagatctggaaaaagattatctggagctttccggctttgaagtggagattgccaacagaggcgacgtagggcttcagaaggcaatgacagaggaatatgatctgattattctggatcttatgcttccggaggtggatggatttgatatctgcaagcaggtacgtcaggaaaaaaatacaccgatcattatggtatctgccaaaaaagacgatatcgacaagatccgggggctgggactcggggcagacgattatatgacaaagccttttagtccaagcgaactggttgccagagtcaaggcgcatatggaacgatataaccgtctggtaggatccggagctgtaaaaaatgatgtaatcgagatccggggaatcaagattgataaaactgcaagacgggcgtgggtaaacggagaggagactacctttaccacaaaagagtttgatcttctgacatttctggcagaaaatccaaaccgtgtctttacaaaagacgagctgttccgggaaatatgggcaatggaatctgtgggagatattgctacggttacagttcatattaaaaagatccgtgagaagatcgagtttaatacagccaaacctcagtatattgaaaccatatggggagtaggctaccggtttaaggtttaatggcagagcagggaaagacggaataaaggactccggagataaaatgattaagaaacgatgatatggggacaggcaggaatagacaactttcctgcctgtccttttttctgttgcggagggaaaaccatagtatataatttctgataaaagaaaaatgtttgattcgtcctgttttggattgtttatacttatttaccagataaaaacaagaaagagtaagaataatcaataaaaaataataaaaaatcattgacaaatatgtagaaaattgttatactgtggacatcgaattaaggtaaagtattttttatgagtatgcaaaggggcaaattgttgaatcagatcagataatgagaacattgcaagacgcaaaaaataagagatgctttttttgttcccatatttcataacgaaattgtaacttattaacaaataaaaaaacaaaaaggagaaagatttatgaagaatcgtaaaaaagttctcgcagcccttctggcaggtgtaatgacactgtccatgggcacaacagtattcgcagcagaggcagaagacggatacgcactgaaggcaaccaacacagaagcaaaatccccggacaatgatctggtgatcgcaatcgagggaagcgtaagctccatggacccggcaaatattccggataccaatgcaatctctgcaacccgcggatgctatgaaatgttagtagcttttgatgaaaaccaggaaattcagggacagcttgcagagtcctatgaggtttccgaggattccctcacctatacattccatctccgtgaaggtgttaagtttacagatggaacagactttaatgcggcagcagtaaaggcaaactatgatcgtatcattgataaagagaacaatctccgtcagagaagaacctttgttgtaacaggagaggacggatcagagacataccgtgtggaaagcattgagactccggatgactacactgtagtattcaagcttactgagccatgggcaccgtttatcaaccgtatgacacagatctgtatgatcagcccggctgctcttgaagagtacggcaatgatattatgaaccatccggtaggaaccggcccgttcatctgcacagagtgggaagagggagatcacacaactttcgagcgcaatgaagattactggggcgaaaaagcttctgtagatactgttactattaaagaggttccggaggcaggttcccgtaccgctatgcttcagacaggcgaggctgatctcgtttatccgatgcctgcagaccagatcgaagcaatcaaaggaaacgatgatgtaaacgtactggcagcagactccaacatcatgagatatgtaactctgaacatgaacgttccggagctgaaagatgaaaaagtacgtcaggctatgaactacgctattgataaagacgcatatgttcagcttatgtattccggatatgcaaaacctgcaacttctatcgttccttctattatcggaggatacaaggagcagactccttatacttatgaccttgaaaaagcaaaagagcttatgaaagaagccggatatgaggatggcttcaagcttacactctggggagacaactccactcaggaagtaaaaggtatgacatttatcaaacagatgcttgctcagatcaacattgacgttgaggttcttcctatggagcctgcaacactgaatgacaagatctatgtagatcaggaagaagcagaagttaatatgtggtatgtaaactggtccgcatctgatttcactatggatggttctgttcgttccctgcttcacagcgacatggtacctcctacaagtgcaaacgcagcgtatttcgtaaacgaagactttgacaaactgttagatgaaggtcttgcaactgctgatccggacaaacaggctgagatttatggcgaggctcagacaatcgcatgggaagctgctccgtggctgttccttggaaacgatcagatcctctatgcatccaaatcttatctctccggtgcatatgtatctccggacggagcatttaacttcactaacgcagtgcttgctcagtaaaagaatatttaaaaagtaaatatttaactggggcgacaggcgccgcagaagtatgtaacagaacataaaggttcttagcagaaaactgccgttcaactgtctgtgaccattcacagatgtggggacggcagtttttgtgactatggacagtgattattttttataactcagactggaggcaaaagaatgggtaaatatttttgtaagcgtgttgcaagcgcaatccctctccttcttgtgatttcatttgtaatatttatgtttatacatatgattcccggtgatccggccagaatgatcgcaggacaggatgcaactaaggaagacgtagaagttgtaagagagcagctgggactgaatgatcctctgcttgtacagtatggaaaatatatgaaaggtctttttaccggagaccttggcgattccatcaaaaacggaaaaactgttgttgagacaatcgctcccagaatgaaaccaacaatcatgctcacagtatctgcaatgatctgggcgactattatcggtattgcgcttggtatcatatcagcagtatttcatggaagaactcttgattatatcggaatgatcattgccatatcgggtatatcggtgccaagcttctggctgggacttgagctgatccagggcttttctgttgctcttcagtggcttcctaccggaggactggattcctggcagagctacatccttccgtcacttaccatgggcgccggaatcatggcggttttaggacgatttaccagatctaccatgctggagaccatgcgtgaggattatgttcgaacagcccgtgcaaaaggcttaaaggaaactcttgttgttatgcgtcatgcatttaaaaactctcttattgagattattacagttgccggacttcagatcggcggtcttctttcaggttctgttatggcagaaaccgtattctctattccgggacttggccgtctgctggtagactctattaacttccgagattacaaggtagtacaggctctgcttctgttctttgcagcagagtatattgtcatcaacctgatcgtggatgttctttacggagtcatcaacccgaaaattcgttataattaggaggaaaaaagatggcacagacaaatacaaatttagatcagaacaaatttgctgctgctgaagagcttcctaaggcgcagagtaaggtaaaagaatttaccaaaaagtttatgaagcgaaaaacagcagttgtttctcttgtttttattctgtttattgttttaatggcaattattgcaccgcttgttgttccttacgcaccggatcagccggattacacagcccttcttcagggaccaagctctgctcatatctggggtacagatgagtttggccaggatgtattcagccgtctgatggtaggttccagactgtccctttcctgcgctctgatcgctacagttatcggaacagccggcggcgttattctgggactgatcgctggtttctacggtggttttgttgattccctgatcatgagatgctgtgatgtgctttttgcatttccggacatccttcttgcaatcgcagttgttgctattatcggaccaggtatggtaaacgttatgatcgctgttgcggtgtttacggttccatcctttgcccgtatcatacgaagcgcaacaatttccgtaaagcagtctctttatgttgaggttgcccgttcactgggatgtaagaacagcagaattctgtttgtccatgtattccctggaactattcagtctatgatcgtaaactttaccatgcgtatcggtacagcaatccttgctgcatcatccctgagtttcctgggattcggagcaaatgttacagagcctgactggggcgcaatgctttcacttggacgtaactatctgaacacagctccgcatatggtactgtttcctggtatcctgatcttccttactgttcttgcattcaacctgcttggagacggtctcagggatactctggatccgaagatgaactaggaggaaaaaccatggcagaaaaattattggaagtaaaaaatctccgcacagaatttaagcgggacaaaacatgggtaacagccgtaaataatgtttctttttctattgaaagaggagaaatccttggtctggtaggagaatccggctgcggtaaatcagtaacctccctgtcagttatgcgtcttcttgcaagaaacagtaagatttccaacggtgaggttattctgaacggaacagaccttctgaaagaagataaaaagggtatgagaaatatccgcggaagagaagttgcaatgatcttccaggagccgatgaactctctgaacccatgtatgaaaatagagaagcagcttacagaggcaattctgcttcataatgattttacaaaagaacaggctcatcagagagcatatgatgtactgaaatccgtaggtattcctgagccggatatgactctgaagagctatccccatcagctttccggcggtatgtgccagcgtgtaatgatcgcaatggccatgtcctgtgagccggagctgctgatcgcagacgagcccacaactgctcttgacgttaccattcaggcgcagatccttgagcttatggaagaaatccgtgaaaagaaaaatacaggaatcctgatgatcacacatgaccttggtgttgtagccgaaatgtgcagccgcgtagttgttatgtatgcaggacgtattgtagaggaagctcctgtaaaagaactgttctctgcaccaaaacatccgtatacacaggggctgatcgcttctgtgccgaagctgggaagcggagtggaatcacttccgtctattccgggaagcgtaccggatctttccgtaatgccaaagggctgcaaatttgcaccgagatgtaagtacgcaacagatatctgcagagaaaaagaaccggagcttatgacagtggaaggtattcataaatgcagatgccaccatatgaatgatcttggaaaggaggcgtaattgatcatgagcgaagcattagtatctgtaaaaaacatatcaaaaacattttctgctaataaggggatgtttggaaagaaaaaattcgttcacgcagtaaacgacgtttcctttgacattatgccgggagagactttttctctggtaggagagtccggctgcggtaaatctacaacaggtaaactgatcgatcatctgatcacaccggatacaggtgagatctggtttgaaggaaaagatatttcaaaaatctctgacaatgagatgcgccctttaagatctgacattcagatggtattccaggatccctacggctctttgaacccaagaatgaaggtacaggatttgatcggagagcctcttcttatccacacaaatatgactgcaggcgaaagactgaaaaaggtacacgagcttcttggcgtagttggcttaagcccgtcacacggagagcgttatcctcatgagttttccggcggacagcgccagcgtataggtattgcaagagcgcttaccgtacagccaaaactgatcattgccgatgagccggtatcagctcttgacgtatccattcaggctcaggtattaaatcttctgcagcagcttcagaaggactttaacctgacatatctgttcatttcccatgacctaagcgttgtggaaatgatctctgacagaatcggcgttatgtacctgggaacgattgtagagacagcgccgaagaaagagctttatgcaaatccgagacatccatatacaagagcgcttctttctgctgttccgatcccggatcctgaaaagaagtccaaacgtattatcctgcagggcgatcttccaagcccaagcaatccgccaagcggatgtctgttccatacacgctgcccgcactgtacggaaaaatgtaaaacagagcgtcctactccggtagaggtagcaccgggacatattgtaaaatgtcattatccggatctgcaagaaacaacaaaataaaacctgcacaggaggaaggtcatgtacacatttaacagagaagagtataacaagagaatggaatggtacctggatgcgagattcggtatgtttatccactggggactttattctattccggcaagaggagaatgggtaagaagtgaagaggaaattccgaaagaagactatatgaagtattttgaggaatttgatcctgttgattacgatccgagagcatgggcacgggctgcaaaagaagcaggtatgaaatatgtggtacttacagcaaagcatcatgacggattctgcctttatgacagccagtacacagatttcaaatccacaaacacaaaatgcggacgtgacctgatcaaagaatatgtggaggctgttcgcgcagaaggtctgaaggtaggaatttactttacgattattgactggtatcatgacgattatcctcattacggagacagacagcatcccatgagaaataatccggcatacaaaaacgacggacgtaactttgacaattatctgacctatatgcataaccagatccgtgaaatctgcaccaactacggaaaaattgatattctgtggtttgacttttcctatgatgatctcagaggagaggcatggagagcaacagagcttatggatatggtgagaagtcttcagccggaagtgatcatcgacaaccgtctggagtgcagcggcgagggttacggttctctggctgcatgtaagcctaccccgtaccacggcgattttgtaagccctgaacagatgattccgccaaatggaattcaggacgtggagggcaatgatattgcctgggaagcctgtgtgactatgaacaatcactggggctattgtgctaccgatcatttttataaaccggctccgatgctgatcaagaagctggtagaatgtgtttccaaaggcggaaatctcattcttaacgtaggtcctgatgtgaagggcaatattcctgaggaatccatgaagatccttcaggagatcggtaaatggatgaagaaaaacggagagagtatttacggctgcggaaagagccagattgcaaaaccggattacggacgtgttacagctaagggcaatcacgtttatttccatctttttgaaaatactatcggaccggttccgcttctgggagtgccgaaagaccgtctgaagggaatccgttatcttgcaacaggcgctgaggtgcctgtatcaacaagctgggtacatagcgactatccggatattgtatttgcagatctgggtctggatcctgttctgccggatcagacagatacagttcttgacgtaatattgacagaagagtaacagcataaaaacctcttaacggaaaggaggtatttcatgtttacagaagaaagacaggcggctattatacaatgtcttcaggaaaagggtaaggtaaaggtaaagtccctcagtgaaaaatttcatgtatcagaggactgtatccgaaaagacctgaagaccctggaaaattccggaaaactgaaaagaacctatggaggggcgatcatgtctcaggattaccccctccagagagacgttattgacagacgaaattatcatctggacaaaaagaagattatagcagaaaaggcttttggacttatcaaaagcaacgagaccgtttttctggatatttccacaaccaatattgagcttgccaaacttcttgctgcctccaggataaaggttgttgttgtaagcaatatgattgatattctgcagattcttgtgcagaatcccatgataactgtcattggtacaggaggaaccatgtatcagggggtaaacggttttatgggagcggcaaccatagaggtattgaagcagtacagctttgacagagcctttctgggaagctgcggtgtggatatggttgactgtacggtcactactctgggagtggaggacgggctgaccaaaaaagctgtgatcaacagcagcagacataagtacgttgtaatggaaaaagaaaaattttattttaatgattcatataaatttgcgcattttgacgatataaacggaatcgtaacagacgagtatccggacagtacgatcgtgaggacgctggaggcatccggggtcaggctggtataaatgctgcaaaataaagaatctttatctggatgcctgcaaaaacgggcaataaggaggatatatggctgattttattttagaagcatgtgtggattcagtggagtctgcactggcagcagcaaaaggcggcgcagaccggctggagctgtgcggcagtctggtcatcggaggaacaactcctaatccgtggctgtttcaggaaatccggaagcatacagatatcaggatccatgctctgatccgtccgagatttggtgatttctgctacacagatgaagaatttatcctgatccgcgaggcggtgaaagaatttcgcagacttggagcagaaggcgttgttattggaatcctgaagcctgatggaactctgaatatggaacagatgaagcgtctgatggaagatgcagagggaatgtctgtcactcttcacagagcgtttgatgtgtgcgcagatccttatgaaacaatggaacaggcaatttcccttggaattgatacaattcttacatcaggacagaaaaatatctgtactgccggagcagaccttcttaaagatcttgtagaaaagagcgccggaagaatcacgatccaggttggaagcggagtgaatgcagatgtgatccgtgagcttcagccaaaaacaggagccacagcgttccatatgtccggcaaggttactatggacagtgaaatggaataccgcagagaaggagtgaatatggggcttccgtctctcagcgagtatgagatctggagaactgatgaagaggctgtacgcagagcaagacaggtgcttgacggattctgcggcagaaattgaaatatacctgtatgtctgtgagataccggacaggaaagggacaatatgagtgaatttctgaaagaaaaccgggagagaattctggaaggttataaaaaaataaaagaacagtttcccggtgtatttgaggagacagataaacaaatagaaaagcaggagccggaaacggctcttgctttgaaatatctttatatgacaatgccctgcagcgatatagggaattattcttttaaggtatttcttgattatgcagagaacagcgtaaggctgtggaaagaagcggaaggtgtcagatctcttccggaagatatttttctgaattacgtgctgtatcacagagtgaatgaagaagagatcgcgccctgcagagaattattccataacgagatcagaagctttatggaagagaacgaaaagctttctcttatggacggatgcagcagaaaagattttgccattgaggtaaattactggtgcgcgcaggaggctacttatcattgtacagacgacagaacactttctgctcttactgtttacagaagaggaaacggccgctgtggagaggaatctgtatttacggtaaatgccatgaggagtgtggggattccggcacgccaggtatatgcgccaaagtggtcgcactgcgatgacaatcatgcctgggtagaaatctggaatgatggaaagtggtattttctgggagcctgtgaacctcttccgatcctgaataagggatggtttacaaatgcctcttcaagagcaatgatggttcattcccgctggtttgatccggcttcttctgatgaggaaaccattggaaaagacggaatggtgacaatgctcaatgagctttcacggtatgcagaggtcacagaatttacagtggaagtatgcgataaagacggcgaaccggttcagggcgcagagatatccttccaggttctgaactatgcggaattatctcctgttgcagagggagttactgacaaagccggaaaatgcaggttcacaaccggtctgggaagtctggccgtacaggtttcctgtggggaattctgtgaatgtgtatttgctgatacaagagaacaaaaagaaatcaaagttactcttggagaaaattccagacaggaaaacatctggaaagaaattgacatgatcgctccggtggatactccgataaatacagatatgcctacgccggaacagacggcagagggaaatatccgactggaaaaagcgtctgcaaagagaatagcaaagacagaaaaccgggtaaatcctgaatgtgaaaaattccttcagaatgtgtctgagtcagactgcgaggaaagtactctgagagcagagcttcttgaaacacttacagaaaaagacagaacagactgtgtggcagaggttctggaagagcatcttgcttacgcggcgccttatgaggaaaatatggaacattctgtttttgtaaagtatgttctgaatccaagagtggatgatgaggttctgatgaaatacagagccgctgtggaagcagagttttctgaggaagaaaaagccggtttccgggaagatcctgcagcaatctggaccgctgttgacaaaaagatcatttctcttccggataaggaaagagcaagtgtgatcaccacaccttccggatgcctgaaaatgggagtgggaagtactctctcaaagaaaattctttttgttgccattgcaagaaccctgggtattccggcaagactgaatccggaagaccgttccatggaatacagaaaagacggaagatttgttcctgtccttccggaggcagaaaagagctgcagccttgtactgaagtcaggggatggaactgtatggaaatatttccagaactggacaatggccagactggaaaatggaaaatatgtttcccttcgtctgggaggtcttacatggcaggatgatcttctgaatgcagagctggagccgggagagtacagaatcattacctccaatcgtctgccaaacggaaatatgtttgcttatgtatattatttttcaatggcagcaggagaaaagaaagaaatttcacttgtcctcagacaggcagatctggaggatatgcttgaaaatattgaacttcctgaatttgaactgcgtaaggatgaagccggcacagaaaaagtaaaggcgtctgagcttactgcggaaggaaagcatattcttatgttcctggaagaaagcagagagcctacagaacatattctcaatgaaatgatggaacagccggaagctttccggaaaatctgctccggtattatctttgtggtgcagagtgagtcagcgcttcaggatcccacaatgaaaaaggcgcttgccatgttcccggaaattcaggtttattatgactgctttgcagaccacattgagcttcttggaagaagaatgtatgtggatcatgaaaaacttccgcttattattgtaacatccggaaaaatgaatggaatttttgccacaagcggttataatgtaggtacaggagatatgcttctcagactgatgtagaagctgtcctgaacatatcaattattttatcctaagaaaagggggatttttgaaatgaaattttattgcggagaagactacaaggcaatgagccgcattgcagcaaacattatttctgcacagatcattatgaagccggactgtgttctgggactggctacaggatcttcaccggaaggaacttatgctcagcttgtagaatggtacaaaaaaggagatctggatttctctcaggttacaagcgtaaaccttgacgagtacagaggactttccggagataatgaccagagctatcgttactttatgaacactcatctgttcgatcatgtaaatattgataagagcagaacctttgtgccaaacggactggagccggacagcgagaaagcatgccgcgagtatgacgctgttgtagaagctacaggcggcgttgaccttcagcttcttggaatcggacataacggacatatcggttttaacgagcctgcaaaagaattctgcaaaaatactcagtgcgtggatctgacagagagcaccattgaggcaaataagagattctttgagaaagaagaggacgttccccgtcaggcttacaccatgggaatcggaaccattatgcgcgcaaagaaaatccttcttgtggcatccggcgaaggcaaggcagacattattgcaaaagcatttacaggcccgatcacacctgaggttcctgcttctatccttcagcttcacaatgatgtgacagttgtatgcgataaagctgcaatgagcaagattaaattataaatatttcataaaaattataaagaaagaactggcatgatgacatctgtctgaaggtagagtataatgggaacacttattactttactgaatctgctgtaaagaaagggagatcaatggacagattatataaaaaactggaagcgtatgggaaatcagatttctatcccttccacatgccgggacataagagaaatcccctgtctgtggcaggggatttttctgtacaacaggatattacggagatcaacggatttgataatcttcatcatccggaaacaattttaaaggaagcacaggaaaacgccgcccggctctatcaggtacaggagagttttttctgtatcaatggaagcaccggggcaattctggcagccgtatctgctgctgtaaaaaaaggcggacatattttgatcgcaaggaactgtcacaaagcagtttatcatgcagcttatcttcgtgatctgaaggtttcctatatttatccacatgaggatgcagaactggggataaacggaggaatttctccgcagcgtgtggaaagatgccttgatgaaaatccggatatcgaagcagtccttctgacctcacctacctatgatggaattgtatctgatataaaaacaattgcagagattactcacagtcataatattcctctgatcgtagatgaagcccatggagcgcatttttgtttttctgattattttcctgtgtcggcagcagagcttggggcggatattgtgatccacagtctgcataaaaccctgccttccatgactcagacagctcttcttcacaggtgcagtgaaagggtggacagaaatcttctggtaagatttctgggaatctatcagaccagcagcccatcctatgttcttatggcttctatggatgcctgtatgtacaaaatagaacaggatggacagaggatgtttgcggaatatactgagaatctggaaagagccaggaagcggctccgaaaaggctcctgtatccggcttgtggagacgggagatccggctatgaatgtatttgatgcagacagatcaaaaatcatcctttctacagtacacagtaccatgaacggaagacagcttgcagaagttctgaggcaggacttccatctggaaatagaaatggaagcagaaaattatgtgattgccctgacttctgtgggcgatacggaagaaggatttgacagactgtgcagagctgttgaagaaattgacagccgggactcgttaaaatacagtgaggaagctgttaaaaaagaaaggtgccgatgtgcggagctgaattcccttatgagaatttcatgcgctatggatgctttaagtgaaagatgtactctggaagaaagcattggaagaatatctgtggagtttgcgtacctttatcctccgggaatccctcttgttgtacccggggagcagattaccggactcctgataaaaaatatgaaaagatatctggagcagggactggagctccaggggctcagtgatatgtcagacagtacgattcttgttcttgccagagatacaagagagatcgtaccaaaaagatctgagggaaaggttaaaatacaggaataatgggaaagattttttatattatgggaaagagtgcttccggtaaggacaggatttactccattctttccaaagacgagagccttggactgaaaagactggtgctttataccacccgtcccatacgggcaggcgaagaaaacggcagagagtattattttacagatgagaataagctggaggaattccgaaaaaccaacaggctgattgaatcaagagcttatcatacggttcacggaatctggacttattttactgcagatgacggacagatcaatccacagggaacagattatctggggatcggaactctggaatcctaccgtaaaatgaaagaatattacggggaggaaacagtctgcccgatatatattcaggtagaggacggagaacggcttcagagggcgcttatcagggagaagcagcaggaaaatcccaggtatgcagaaatgtgccgcaggtttctggcagatcaggaggatttttcggaggagaatatccttgcagcaggtatccggatccggttcgaaaatgatgatctggataattgtgtcagaaatattataaaatatataaaatctgtgacataagcaaaaacactttttattaacagacaaaatatgatataatgtgatttatcaggataaagataaacgcgaaaaagtgaggtgattctgaatggctggttttaataatattattggacatgaagaaattatcaggcatttaaagaatgcaatgaaaacagggaaagtttcccattcttatatttttaccggaagacccggatcaggaaaaaagcttcttgcaacaacctatgcaatgactcttcagtgtgagcagggcggaacagaaccctgccagaaatgcgactcatgcaaaaaggctatgggcaagaatcatcctgatatcattatggtaaatcatgaaaagccgggaacaatcagtattgatgagatcagagaacaggtgatttatgatgtagcggtaaaaccatactgcagcccttataaaatctatattatcccggatgcggagcttatgacagtacaggcccagaatgctcttttaaaaacaattgaggagccgcctgagtatgcggtgatcatgctgcttacaagcaatgcagacgcaatgctgccgaccattcagtcacgctgcgtcagactggatctgaaggttgtggatgacagccttgtaaaaaaatatctgatggaacgtcttcatgtgccggattatcaggcggagatagatgcaagctttgcacagggaagtataggaaaagcaaaggaagcagctacctcggaggaattttccaatattacacaaaatgctctgaaaatcctgaaaaatgcaaattctatggaggtttatgagctggcggatgaaattaaacttttatccggagaaaaacaaagtatcgacgattatctggatattttccagttctggttcagagatgtcctgatgtttaaggcgaccagagagattgataatctggtatttaagcaggaaattaattatatcaaggaacaggccagtcagcgctcctatgagaatctggaaaaaatcctggaggcactggaaaaaacaaaagtacgtctccgtgccaacgtaaactttgagcttgcgcttgagctgttgttcctgacgatcagggagagatagaatgacaaaagtagtaggtatcagattccggaatgtcggaaaaatatattattttaacccaaaagaatataaaatgaaaatcggcgatcatgtgatcgttgaaactgcaagaggcatagagttcggaagagtagtgcttgggccaaaagaagtgggagaggatgaggtgatccatcctctgaaagaagtccttcgcgtggcaacttctgaagatgaagaaagagagaagcagaatcgccagaaagaaaaagaagcgtttaaaatctgccagaaaaaaatcagggatcatggtctggaaatgaaactgatcgatgcagaatatacctttgataacaacaaagttctgttttatttcactgcagacggaagaattgatttccgtcagcttgtaaaagatctggcagctatttttaaaacaagaattgaacttcgccagatcggcgtccgtgatgagacaaaaatcctgggcggaatcggaatctgcggaagatgtctgtgctgtcatacgtatctttctgaatttgcacctgtatcgatcaagatggcaaaagagcagaatctttctctgaatcagacaaagatttccggagtatgcggaagactgatgtgctgcctgaaaaatgaacaggaaacttatgaggagctgaacaaaaagcttcctggaacaggtgatacggtgaccttgccagacggacttcagggaactgttcacagcgtcaatgtactgagacagctggtaaaggtaattgtggaagtcaatgatgaaaaagaaattcaggagtatccggtagaagagctgaaattccgtcccagaaagaaaaaagtaaagatttctgaaaaggaaatgaaagagctggaacggctggaagataaagaaggagattccaaatctcatggaaaataatcagcgggacagtctggtaatgccgggggaacgcgtagatgatctccaaaatggatattatgtgattcagaatccgcaaaaattctgttttggaatggatgcggttctgctctctggttttgcaaaaataaaaaatgatgaacatgttctggatatgggaaccggcacagggattattcctgttcttctgaaagcaaagacaccgggaggacattttaccggtttggagatacaggaagaatgtgcggagctggcgcagagaagcgtagcttataacggtctggaacaggacattgatattgtctgcggtgatattaaagaggctgctgaaattttcggagcagcttcttttcatgcggtaacaagcaatccgccttatatgatcggacagcatggactgcagaatccctatatggcaaaggcgattgccagacacgaaatcctctgcactctggaggatgtggtcagtcagactgcaaaggtgttaaaggacagaggacgtttttatatggtacaccggccgtttcggctggtagaaatttttcaggtgcttaccaggtataaactggaaccaaaaagaatgcagcttgtttatccctttaaagaccgggaaccgaatatggtccttattgaggccttaaaaggcggcaattcaaggatcacagtggaaaaacctctgatcgtttatgagaagccgggcgtgtatacagaagagatactgaaaatctatggccccggggtgtaaatccagaatcggaacagaaatccggttttgtatagatgacgatatttattaacttctggctaattattttaaatattaaaataatttgtcgggaagttaagcgcaaactgacagtaagcttgatagggatttaaaagttcatgatttatatgtttataaaaaaaggataaaacagtttttaaatttacagatactgtaaataaaatcttaaattacaaggagcggagaaggaatatgagcggaaaattatatttatgcgcaaccccgatcggaaacctggaggatattacgctcagagttctccggaccttaaaggaagtagatctgattgctgcggaagataccagaaacagcatcaagcttctgaatcactttgacataaaaacacctatgaccagttaccatgaatataacaaaattgaaaaggcgcatactctgatagaaaaaatgcagggcggaatgaatattgcccttattacagacgcaggaactcccggaatctcagatccgggagaagagcttgcggccatgtgctatgaagctggaattgaagtcacttcgcttccgggacctgctgcctgtatcacagcccttacgctgtccggacttcctgcaagaagatttgcgtttgaggcatttcttcccatggacaaaaaagagcgcagggaggtgcttcaggagcttgtggatgaaacaagaaccattattatttacgaggctccccataagctggtgaagactttaaaggatcttaaagaaacccttggaaacagaagaataacactttgcagagagcttaccaaaaagcatgagactgcttttcacacaaccatagatcagctgatcgcctattatgagaacgaaaagcctcttggagagtgtgtgcttgtaattgaaggcaaaagccgccaggagctgaaagaagaggcagcagcctcctgggaagagatttccatagaggagcatatggagatttatgagagcaaggggctttcacggaaagatgccatgaagcaggtggcaaaggaccggggagtaagtaagagagagatttatcagtatctggtaaatggagagaaatagaagctatttattattgaataaaaacataaatatgaaagggaatgctgtatgaatgattttatcatagtacggcattctttttgtttacaggaaaacagtgaaattgagatataaaattgacaaaatatagcaaattcttctgttgcagattgatttttataatgctaagataaaaacagagcaacattttctttttattcttaattacatttcatatagcagatgacagatctgtctttccggaaaattcttgctttactacccattacaaaggcaggagtttatatcgggggaaactcctgagagatcataaggaggttctatatgaataaggacagagagaatgccagaaagcatgataaaacagttttgcagtggcaccctgcattttttgcagatattcagattgaactgcaggaagatgcagacagtctgatttttgagaatgagcatcaactgggaacaaaacctatggaaatagatgttctggtaattaaaaaagaagatgggaaaatgatacataaaaatatcggaagaattttccgaaagcataatattattgaatacaagagtccagatgactatcttagcattgatgatttttataaagtttatgggtatgcctgtttttataaagctgatgccagagcagtaaatatgattcagattcaggatttgacaatctctctggtatgtagtaaatatcccagaaaactgatgaatcatttaaaacttgaaaggaaatatagaattcagaaaattgaatctggaatttattatgtaaatggtgatgtgattcctgttcagcttattgttatatcagaactggatccgaacagaaatctttggcttcgaagtctgacaaatcatctggataatgaaaatatgattcgtcaaattttaggagagtataatggaaatctggataacactttgtatcgttctgccatgaacatgatagtaaaagccaataaagacaaatttaaagagggagatgtgcttatgtgtgaagcattagaagagttatttatggaaattatgcctgaccgggttcagaagcttatggatgaggcccagaaggcaagagatgaagaaacggcacaaaaaatagaagagaatgccgtacaaataaacaagttgacatctatacttttggaggaaggacggattgatgatgtaaaaagggcatcaggggacagaaattatcaaaagaaattactgaaggagtttggattgctttcagaaaaggtgtaaattaatagaattttaaacagaaaaacaggattttgagcttgaatatggatttataaaaacagagctatgtcttatgtgaattctctcagatgtgttgagaatatttactctgcatttggggagtggttcactgaaagatatagcttttttcagcgttttgcgcaaatttaatggaaagcacccccattttgtgttataataaattagtattactatgtctatttatcagtgggtgcaggatttctgtatgcctgttgatgccataaatatagaatgacaggaggacgcaaatgggcggagagaatacagagtacggagcggatcagattcagattctggaaggactggaagctgtaagaaaaagaccgggaatgtacattggaagtacgtcaagcaggggcctgcatcatcttgtatatgaaatcgtggataatgcggtggatgaagcgctggcaggattttgtacggaaattcaggtgacgatcaatcctgataattcaattacagttgtagataacggaagaggtattccggtaggaatcaaccataaagcgggaattcctgcagttgaggtggtatttactatccttcatgcaggcggtaaattcggcggcggaggatataaggtatcaggaggacttcacggagttggagcatctgttgtaaacgcgctttctgaatggcttgaggtttctatttttaaagagggaaaagaatacaaacagagatatgaaagaggacacaccatgtatcctctgaaagttgtgggagactgctctcctgaatatacaggaacaaccgtaacctttttacctgataaagaaatttttgaagaaactgtttatgattacgatattctcaagcagcgccttcgtgagatggcttttcttacaaaagggctgaagatcgttctcagagacgacagagaagagtcaaaaaaagaaaaatctttccactatgagggaggaattcaggagtttgttacttatctgaacagaagcaaggaagctctttatcctgaggttgtatattgtgaaggtgagaaagacggcgttgtggtagaggttgccatgcagcacaatgattcctatacagaaaatacctatggtttcgtaaataatatcaatactccggagggcggaactcatatcgtgggcttccgtaatgctctgacaaagacatttaacgattatgcccggaaaaacaagcttctgaaagacagcgagccaaacttaagcggtgatgatatccgtgagggtctgactgctattgtcagtgtaaaaatcgaggagcctcagtttgagggacagacgaaacagaagctgggcaacagtgaggccagaggcgctgttgattctattgtcagcagacagctggagatttttctggagcagaatccaactgtggcaaaagcgacagtggaaaagtctgttcttgctcagagagcccgtgaggcagccagaaaagccagagatcttaccagaagaaaatcagcccttgacggtatggcgcttcccggcaagctggcagactgttcagataaggatccgaaaaactgtgagatctatattgtagagggagattctgcgggtggttctgcaaaaacagccagaaaccgtgcaacacaggcaatccttcccctcagaggaaaaattctcaatgttgaaaaagcccgcttagataaaatttacggaaataaagagatcaaggctatgatcacagcttttggaacaggaatccacgaagattttgatatcagtaagcttcgttatcacaagatcatcatcatgacagatgccgatgtagatggcgcgcatattgcaacacttcttcttacgttcctgtatcgttttatgcctgagcttattaaacagggatatgtttatctggcgcagccgcctctttataaaatcgaaaaaaataaaaaggtatggtatgcctatgatgatgcggagctgaaccgtattctggaggaaataggccgcgacaataataataagatccagcgttacaaaggtcttggtgaaatggatgcggatcagctttgggagacaactatggatcctgaaaagagaatccttctgagagtgacaatggatgaatccgcaacctcagagattgaccttacttttacaactctgatgggagataaggtagagccaagacgtgaatttatcgaagagaacgcaagatttgtagaaaatctggatatctaggagaataaaaaatggaagacaatatttttgataaagtgcatgaggtggatctgcagaagaccatggaaaaatcttatatagattatgccatgagtgtaatcgcctcacgagcgctgccggatgtccgggacggactgaaaccggtacagagacgagttctgtattcaatgatagagctgaacaacggtcctgacaagccgcaccgtaaatgtgcgcgtattgtcggtgataccatgggtaaatatcaccctcatggagacagctctatttacggcgctctggtaaatatggcgcaggactggtcaaccagatatcctctggttgacggacatggaaactttggttctgtggatggcgacggcgcggctgccatgcgatacaccgaggcacgtctcagcaagatttccatggaaatgctggcagatatcaacaaaaatacagttgatttccagcctaactttgatgaaacagaaagggagccggtagtgcttccgtcccgctatccaaatcttcttgtaaacggtacctcgggaattgccgtaggtatggcaacgaatattcctccccataatctcagggaggttattcaggctgtggtaaagatcattgataatatcattgaggagcagcgtgatacaagtattgaggagattcttgaaattgtaaaaggaccggattttcctactggagcaacgattctcggaacaagaggaattgaggaggcttatcgtacaggccgcggcaaaatccgtgtccgcgcagtgacaaacattgaaactcttcctaatggaaagtcccgcattattgttacagaacttccgtatctggtaaataaggcccgcctgatagaaaagatcgcagagcttgtccgtgacaaaaaaatcgacggaattacagacctgaacgatcattccagccgtgaaggaatgcgtatctgtatagatctgcgcaaagatgccaatgcaaatgtagttctgaatcagctgtataagcatacacagcttcaggatacctttggagtgatcatgctctgccttgtttcaaccaatggaagtcttgagccaaaggttctcaatctccacgatatgctgaaatactatctggctcatcaggaggatgttgtaacaagaagaactcagtacgacctgaataaggcgcaggaaagagctcatattttagagggacttctgaaagcccttgataatattgatgaagtgatccgtatcattcgtggttccagaagcgttcagattgccagacaggagctgatggatcgttttgagctgacagacgtacaggctcaggccattgttgatatgcgtcttcgtgcgcttaccggtctggaaagagagaaactggaaacagaatacgcagaattaatggaaaaaatccgcaaattaaaggcaattcttgaagacagaaatcttcttcttcgcgtgatccgtgaggaaatgctggagatttccgataaatatggtgatgacagaagaacctctattggttttgatgcctttgatatttccatggaggacatgattccccgggaaaatactgtgataactatgacaaaactgggttatatcaagcgtatgacagtggataatttccgcagccagaacagaggcggcaagggaattaagggcatgcagactcttgatgatgactatattgaagaactgatgatgacaaccactcatcattatgtgatgttttttaccaatacaggacgtgtttaccgtctgaaggcctatgaaattccggaggccagcagaactgccaggggcacggcaatcatcaatctccttcagcttatgccgggagagcggattactgcggttattcctatcaacaagtttgaagaggatcagtatctgatgatggctacccgtaagggtctggtgaagaaaactccgatccgggattatgcaaatgtacgtaaaattggccttgcggcaatttcactgcgtgatgatgacgagctgattgaagtaaaggtaacaaacaataaaaaagatattatccttgttaccaaggacggtcagtgcattcgctttaaagaaacagatgtgagaacaacaggccgtgtttccatgggtgtaagaggaatcaatcttatggatggcgatgaggttgttggtatgcagctgaattctcagggatattatctgctggttgtatctgagaacggtatgggcaaacgtacctccatcagtgaattcacctgccagaacagaggcggcaagggtgtaaaatgctataagatcactgaaaaaacaggaaatgtgatcggagcaaaagctgttaatgaagaaaacgagattatgatgatcacaacagagggtattattatccgtctgcagtgttctgatatttctattcttggaagaatcacatcaggagtaaaactgattaatctttctgacggtgtgacagtggcaagctttgcaaaagtcagagaaaaggaagaagaaaaagttctcgataaagcagacggcggacagtcagaagcagttgaaacagaaaaccaggagacaggtacagaggaataaagaggtaaagagcagttatggtacaacaggtaaagtcttctaacaacaaaaaacgcagacctgcaggcaaaaattccagaaaaaggaaatcctcagcttcttccagaagaaagaaaacgaatatcaatataaaaatgattgcaggggccgcagtactggcggtcctggtgatcgttcttgtttttgcggtaaaaagctgcggggtcagcaataagacgcctgagaaggtggtaaaaactctggtcaaatcctatgtggacggagatgaacggaagattaaaaaatgctatggagtaaaaaaagcagataaaaatcttgaaaaagaaatctctgccacaattaaatactttgaagtacataagccaaaaaaagcagaaataaatgcctgtgatacaatttacaaaaatggcaagaatgcttatgtctatatcacatacagtctgattctggaggatggacagtcctatccctgtatcagtacttatatgacccagcagaatgaaaagggaaagtacagcattcttacaccttctgatattacagacgatatgaaaaaagaagcggctgccagatatgcgtcatttatggaaacagatccttataaggaatatgtgacagcatatgatactttttcaaaaaagaatccgggatatgaggaaaaactggctacaaaactgaattaatatttctgtagtggaggaaagctgttgaaatgaaaagaattataatgatggtgctgcgcaatctgccgtttattccaatggcatggtttaagctgtgctggtatgcgtctcatgtagacaattatacagaaggggaacggtatgcccttcttaaaatgattgacagacgtgcgaataaaggcggaaatattaccattgatgcccatggcgtggagaatattcctgaggaaagcgggtttattttttatcccaatcatcagggcatgtatgatgttcttgcaatcatggcgccgtgtccggttcccttttctgtggttgcaaaaaaagaagtaggggaagttccgtttttaaagcaggtatttgcctgtatgaaagcctttttgatcgacagagaggatatcagacagtccatgcaggtcattatcaatgtgaccagagaagtaaaaaatggccgtaattatctgatctttccggaaggaacaaggagtaagcagggaaatcatccccaggagtttaagggaggaagctttaaggcagcaattaaggcgaagtgtcccattattcctgttgccctgattgattcttataaatcctttgatacgggatcggcagcgcccgtcacagtacaggtgcattttctgaaaccgatggaatatgaagaatataaggatatgaaatcaacagaaattgcagcagaagtaaagcgaagaatagaagaaacaataaaagcaaacggcggatgggactgaaatgatggctggagtagtatgaaaatgaaaaaaacaaaaaatatagagagatttaagttttatggcgggtatacagtcttatttacgatttgtatgatatgtacgtcattatattttatttataataaatcaacatttatatggtcagttgatggaataagccagcactataatgcgctggcttattatggtgaatatttacgggatattttatggaatttatttgaaaagcatagtgttatcattcccacttacgatttttctattggatatggagctgatgttttaaatacattacattattatgttattggagacccgctgaatcttttggctgtatttgtgtctaaagagcatacggaaatcttatttcatgttcttgtaattcttagaatctatcttgccggaattactttttctgtctttgccagaagccgtggaaacagatcatctgcggttctggctggagtgccgatttatcttttttcggaatacgtgctgtattttttctgcaaacatccattttttttaaatccattgatatattttccgttgattcttttaggcgtagacaggatttatcgtaaaaaaggaccggggatatatattgttgccctgattattagtgcgtgcagcaatttctatttcttttatatgctgggaattttgacagtaatctatgcggtttttcaatattttggtttttatcattccattcaatggaaaacagtgtttcgacttttgttgaaatttggactgtatacgattttggctatatgtgcagccggggtttttctattgccttctctggggcttctgttccagacaggaaggatggctaatgaaactacagtacctttgttatatgggattaaatattatgcacgctttttttccggatttatcagtatggacagtccgggacaccagacttttcttgggtatacggttattgcttttccggctgtgattctgttgtttgcaactaaaggggaaaagcttttaaaaacaggatttgttttacttacaggatttttgtgtattccttttatagctcatgtatttaatggtatgtcttatgtgacaaacagatgggcatttggatatacgatgcttgtggcgtacatagtagtaaagatgtatccggtattcctaaagctttgcatcagacaaaaaataattttgattgtgtttacggtacttgagcttctggcatgtatggcaggaatagcgggaaaatatctggtaggcgaagaaactaagcttaaggttatgacaattcttttgtttttgctgatactgtttgtggctgtgctttgtatgagtaagaagcaaaaaaatccaggtaaaattttttttacttttgttatgtgcatgaatgttgggtgtgttctcattaatgcgcttgatgtcaggacgagagaagctgatgcaaatagatttatccaacaggggagtgcgcaaagacaattggaaaatattccttctgcagaactgggggaattttcagaggaaaaaaattcctggcgttatgatgaggaagaaactggagaaataaaaaactccacattacagacaggactgtatgggacatctttttatttcagcatggcgaatccatatgtggcagaatatcaaagttcattatactggaataatacccaggagcaaagttatcgtggggcagataaaagaagtgcgttggagattctgggaggagtaaaatattttgtcactccaaaagaaaggaagggacctggtgcttatcaggaaaagaaaaattatgtagcaggcgaaaaagaatttactatatgggaaagtggaaagaaactaccgtttgtatttgcatacgataaatatattggcagagatgaatttgaacagttaaatatagaacaaaagcagcaggccctgatggaagcggtagtattggagcgggataaagatattggtgattgggataaagagtatattgtttcaaatgatgcgaaagaaccggaaacaatatggacttccagaggaaaaatcaaattagaagaaaacatgatccaagtacaggaacgaggggcaacgctgaacattcagacagatattcagtacgagggtgaagtatatttaatttttgaggggcttgagtatgaggacggagcttccagtggtatttccagaacgaaatccaaaattacaattaatattactcagaacaaaataaaaaagaaaatagtttttaataatgcaaacgaattcgcggaaaataatggaaaaaataattttctgtgtaatttagagatgaatgagcctggaaaaaaagaaatagagataaagtttccgtataccggaacctatcgctttaaaaatatcagagttgttgttcagcctgtggagaaaataataaaaaatgcagagaacttagagaagggtgttgatggatgggtctgtgcagatgggaatgaggtaaaagcttctctggagttagaagagccgcgtctggtatgtctggctgtaccttttgacaaaggctggactgctgttgtagatggaaaaaaggctgaacttatgcaggccaatataatgtatatggcattgccgttagaagagggaaaacatgagatagaacttcattattccaatccgtttatttgcacaggtgcaatcatttctgtcattggtatactgggggcagtgatatgtataacaggaaattatgtaaagagacgaagaaaatagtttctgaaaacagatgaagtgtaaagctgttgccttgttgaaaatacaaatgaaaaaaggtgacatttctcctgcaagaggggggatgtcacctttttggacatcagaagaaattagatgtatgaacagttttgggagcttcggcattgttttggtcttgtaaatgtttacatttgttttttcagctttcggaaatctctgagagcattccagccgatttttataattttttttatgttaatagaatttacgcctccctgtctgggtttaaaagaaatttcccggaagcataatttttcatgatagtaggcaaaatatgtagtcatcataatgttggggagattataatttttgggaagcttttttatatatttcttaaccagtccggatttcataagccgaaagggggcgtttgcatcagggacttttactccaaaaataatccgaagcagtaaacagacagtgttttccacaaatttacgggcttttccatcgcccctgattgttcgtttgccgattactgcatcgtaatcttttctcagattccagaattcttcaaattcaccggggtccgtctgcccatccgcatcagtctgaaaaacatagtcagcgcccatttccacagcatagttatatccgtaaagaaccgaagaaccgtgtcctccgtttttctttgtcagaggtttcagaaggggcatggattctgaaagtctgcacagaatcttccaggtgtcgtcagtgcttccgtcgttgacaacaaccatttttgaggctccgccgccgttgtgtttttcaataatgggataccattgctgaatggttttttgaatgttggcctcttcgttgtaggcgggaattacaatatataatttatccataaatagatgtctcctttgatagttttaggtatggttctgtaaatgagaaaatttgaaaaagtatacaaaattctcacggatctgtctttataagattcacatatagagcttaaatttcttttatgttcgtatatcatggatcctattgtgcagaattcgatgcttgttcatttatagcaaagttctgttttatatacatttgaatatgattttgttcatatatcatttggtaatgatctgacagatattgaagaatttcccggttttttattccgtaggggaaaatctgctttttttcagcattctggtaagaaagaatgatgatatcgtttttgccgctcagtatagattgcacctgtgcgttgactgcgtccggaaaggtctggtagctgatagcagggatgtaaaaaaacttatcttccggaattacattaaatttattataaaacatagatttgttattaactgtaagtactgtttttctgtcagaataatatttatgataaatgtctgccatgttgtctgcagtctgcgaaatctttggtatgtttgtcagagaaaaaagctttacaggcatctggaggttgacacagcctgtaaaagtaaaaagtcctgcgatgagaagcttcctgtgacaaaacagtttctctgaaaataaagcggccttttccgttaaaaataagacggcgggcagaaaaaaaggaatcagatattcatagtaatgcccgtagtttctgccggacagagaaacagaaaatacagagagcagcagggatacagcatacattgcccggaagcttcgtgaaaactgtgcggatcttattacaatgatcagagagataagacatccaagaagcatacagaaacctctgatatttgtaaaaagctgaaaaaaattttcgacagaagaaccgtttgaggaatactgcagattaaaaaacaaagactgctgtatcattggcttcagactgtgggtattcaggcaataaataatgactggcagaattcctgtacatactccgagacttccggaaactgcattcagaagaatggatttatactttttataaaaaatcagtcttagaaggaggacaatggcaattcctccccacattgcagccatattaagccgaagactcagagcaattccggcacatattccatgaaaaaacatgaaaagcggaggatgatcaataatctttcttttatagtatttgataataagaaaaacagacagaaactgaaaagtcagtccataggtctcaacgaaattccctccctggtaggtgaaaaaattaagtataagtaaaagcatgaggcccacagaaaggcttttgcatatttcggaaacccggtttcctgaaattaagtctgtaattttaaataaaagaattacattgatgatcataaatgcgcattcaataataaaaagcccaatcgttgttttggaactgagacaggctccgagataattaaagaaatagacataccatcctttgtgatcaaagagatcacgatatgggactttacctgacagcatactgcgccctattgtaaaaaagacggagctgtctgtgcccatgctgttgacaacaggagaagagcctgcgctgaaaagcataatacatatggtataaagtgctccaagcaggtaacgagaggaacgtctgaaaatcaaagttctttttaggaaaatggaatcagttgcataagagcttttcatgggaaacctccgaataaataatatagcagaaacaaaatataacaggaaaacgtgggtgtggaagcagtaaataaggtttctgcatggatatattttatcacaggaaaggagaaaagtagagaggtaagtatggtaatcatggaaaaagaatagaaaagtaaagtgtggaataggatctctgaacaaaataatacaaaataatttgaattttttataaaaaacaggttgacaatatgaaataccttctgtataattaacaatgcatttcagatataaatgccttcaaattgcataagaaattatgagttcggagtctggagaagtactcaagaggccgaagaggtgcccctgctaagggtataggtcgggtaaccggcgcgagggttcaaatccctccttctccgttttgttttttgaagaaataaaaaacttcaaaaaattaaaaaaacttgttgacaaccgcttgaagatgtggtaaagtaaacaagctgtcagcgagagagcgaattacttaaaagaacatcgaaaaagtttgaaaaaacttgaaaaaagttcttgacaaacaaaaaaagatgtgataaagtaaatgagctgtctgagagacagaaaataaagaaccttgataactaaacagtgagacacatacgattctcgaaaattcttttatacattcaaagaacggttcgatgaaccaacaacagtaaaacgagagatagctagtagttatcttgagtggaacaacctcttgagcctttggctcaatcggtgagatgcaattaagccaatgcaagcattgctgaattgcttacacacttttacagagagtttgatcctggctcaggatgaacgctggcggcgtgcttaacacatgcaagtcgaacggggattattttgacagagacttcggttgaagtcgttataatcctagtggcggacgggtgagtaacgcgtgggtaacctgcctcacactgggggataacagtcagaaatgactgctaataccgcataagcgcacgggattgcatgatccagtgtgaaaaactccggtggtgtgagatggacccgcgttggattagccagttggcagggtaacggcctaccaaagcgacgatccatagccggcctgagagggtggacggccacattgggactgagacacggcccagactcctacgggaggcagcagtggggaatattgcacaatgggggaaaccctgatgcagcgacgccgcgtgaaggaagaagtatctcggtatgtaaacttctatcagcagggaagaaaatgacggtacctgactaagaagccccggctaactacgtgccagcagccgcggtaatacgtagggggcaagcgttatccggatttactgggtgtaaagggagcgtagacggagcagcaagtctgatgtgaaaggcgggggctcaacccccggactgcattggaaactgttgatcttgagtaccggagaggtaagcggaattcctagtgtagcggtgaaatgcgtagatattaggaggaacaccagtggcgaaggcggcttactggacggtaactgacgttgaggctcgaaagcgtggggagcaaacaggattagataccctggtagtccacgccgtaaacgatgaatactaggtgtcgggtggcagagccattcggtgccgcagcaaacgcagtaagtattccacctggggagtacgttcgcaagaatgaaactcaaaggaattgacggggacccgcacaagcggtggagcatgtggtttaattcgaagcaacgcgaagaaccttaccaagtcttgacatccctctgaccggtgagtaacgtcacttttccttcgggacagaggagacaggtggtgcatggttgtcgtcagctcgtgtcgtgagatgttgggttaagtcccgcaacgagcgcaacccctatccttagtagccagcggtttggccgggcactctgaggagactgccagggataacctggaggaaggcggggatgacgtcaaatcatcatgccccttatgatttgggctacacacgtgctacaatggcgtaaacaaagggaagcgagagtgtgagcttaagcaaatcccaaaaataacgtcccagttcggactgcagtctgcaactcgactgcacgaagctggaatcgctagtaatcgcggatcagaatgccgcggtgaatacgttcccgggtcttgtacacaccgcccgtcacaccatgggagtcagtaacgcccgaagtcagtgaccgaaccgaaaggacggagctgccgaaggcgggacggatgactggggtgaagtcgtaacaaggtagccgtatcggaaggtgcggctggatcacctcctttctaaggaagaagaagtagagagatgtgtttcactgttgagttatcaaggaagaattgaataaaaccatttctggtgtcgatgcgcttaggggacacacccgttcccatcccgaacacgacggttaagacctaagcggccgatggtactgcattggagacgatgtgggagagcaggtggacgccagatcaaatggggatgtagctcagttgggagagcacctgccttgcaagcagggggtcgagagttcgaatctcttcatctccattcaaaagcttttagcttttgaaagatgggcttatagctcagctggttagagcgcacgcctgataagcgtgaggtcggtggttcgagtccacttaagcccattgggtcttaagtaattaagcccaggatattgtaccttgaaaactgcatacatgtaactttaatcgaaaagattaaagatccttgatacaaacgtaaaacgtaagataggaagacatcgataaatttatttatcagcaatgagaatcaaagaccgcatcacctacgctagggtgatgaaaagcgaaaggtcaagcagaaagggcacagggcggatgccttggcactaagggccgaagaaagacgtgataagctgcgataagcttcggggaggagcaaatatccattgatccggagatctctgaatggggaaacccacatgaggaaacctcatgtatccatacgccaatccataacgtatggaggggaacccggggaactgaaacatctaagtacccggaggaaaagaaagaaaactcgattccgtaagtagcggcgagcgaacgcggaggagcctaaaccagtgtgcgtgcacgctggggttacggactgcatttaagattctgtaaagctagcagaacggttttgggaaagccggccggagagggtgagagccccgtacgcgaaagcagagcagactgagcaggatccagagtaccgcgggacacgagaaaccctgcgggaagtgagggggaccaccccctaaggctaaataccacttagtgaccgatagcgcatagtactgtgaaggaaaggtgaaaaggaccccgggaggggagtgaaagagaacctgaaaccctgtgtctacaagctgtggaagtgctttatatgcacgaccgcgtactttttgtagaacggtccggcgagttgcgcttactggcaaggttaaggtcttaaggaccggagccgtagggaaaccaagtcttaagagggccagagtcagtgagggcagacccgaaaccgggtgatctatccatgtccaggttgaagctgccgtaagaggcagtggaggaccgaacccacatccgttgaaaagggtggggatgaggtgtggataggggagaaattccaatcgaacccggagatagctggttctcctcgaaatagctttagggctagcctcggtagagattggcggaggtagagcactgaatttcctagggggcgtcaaagcctaccgaagaatatcaaactccgaatgccgcagaattgcttaccgggagtcagactgcacgagataagttgggcagtcgaaagggaaagagcccagaccttcagttaaggtcccaaagtgcgcgttaagtggaaaaggatgtgggatttcaaagacaaccaggatgttggctcagaagcagccatccattcaaagagtgcgtaatagctcactggtcgagaggtcctgcgccgaaaatgtccggggctgaaacgcgccaccgaaactaaggaatcagaaatgattggtagaggagcattgcatgcgggacgaagcagtaccgtaaggagctgtggactgcatggaagagagaatgccggaatgagtagcgagaataaggtgagaatccttatggccgaatatccaaggtttccagggtaaagctgatctgccctgggtaagtcggggcctaaggcgaggacgagagtcgtagccgatggacaacaggtggagattcctgtactgcggtataacagaactgtggggacacgtgcagaaagcgggagccgggaatggaaagcccggtgcaagtgaggtaccagacacattggcaaatccgtgtgtcaatgggaagacacgacgcggaccgaaagaaagtagggaagcccgtgagctgtgcgtcaagaaaagccgctatagtttataccgtacccgtaccgtaaaccgacacaggtggatgaggagagaatcctaaggccggcggaagaagcattgtcaaggaactcggcaaaatgaccccgtaacttcgggagaaggggtgccagggagacctggccgcagagaataggctcaagcaactgtttagcaaaaacacaggtctatgcgaaaccgaaaggtgaggtatatgggctgacgcctgcccggtgctggaaggttaagaggagaggttagcgcaagcgaagctttgaatttaagccccagtaaacggcggccgtaactataacggtcctaaggtagcgaaattccttgtcgggtaagttccgacccgcacgaaaggcgtaatgatttgagcgctgtctcgacaatgcatccggtgaaattgaagtaccagtgaagatgctggttacctgcgccaggacggaaagaccccatggagctttactccagtttggtactgggatccggtgctgcatgtacaggataggtgggagactgagaacacaaaacgccagttgtgtgggagtcgctgttgggataccacccttgcagtattgggtttctaaccatccgccgtgacccggcggtgggacaatgccaggcggggagtttgactggggcggtcgcctccgaaagggtatcggaggcgcccaaaggttccctcagaatggacggaaaccattcgcagagtgcaaaggcagaagggagcttgactgcgacaccgacgggtggagcaggtacgaaagtagggcttagtgatccggtggtattaagtgggaatgccatcgctcaacggataaaagctaccctggggataacaggcttatcactcccaagagttcacatcgacggagtggtttggcacctcgatgtcggctcatcgcatcctggggctgtagtaggtcccaagggttgggctgttcgcccattaaagcggtacgcgagctgggttcagaacgtcgtgagacagttcggtccctatccggcgtgggcgtaggatatctgagaggagctgtccttagtacgagaggaccgggatggacgggccgctggtgtaccggttagactgccaagtctacggccgggtagccaagcctggaagggataaacgctgaaggcatctaagcgtgaagcccccctcaagatgagatatcccatttgaaagaagtaagaccccttgaagacgacgaggtagatagggcagaggtggaagtgcggtaacgtatggagctgactgctactaatcggtcgagggcttgaccaaaaagtaaggtcaaaaatgattccaatgtcaacatgtatgtagttttgaaagtgcaatactttctataatggcccagtggctcagttggttagagcgccgccctgtcacggcggaggtcgagagttcgagtctcttctgggtcgcttgcttcatcaatatgatgcagcgacaaataatttaataatatggggtcttagctcagctgggagagcatctgccttacaagcagagggtcataggttcgagccctataggccccatagaaatcaggggtggattcccgagtggccaaagggggcagactgtaaatctgttggcaccgccttcgaaggttcgaatccttctccacccattaacctgaaaaggttaagagctaatgtcaaaggctcatggtaagccgatgtggctcaattggcagagcagctgatttgtaatcagcaggttatcggttcgagtccgatcatcggctttcaattcaataataccgcggggtggagcagtctggaagctcgtcgggctcataacccgaaggtcacaggttcaaatcctgttcccgctatttatgcccagatagctcagttggtagagcagaggactgaaaatcctcgtgtcgctggttcgattccggctctgggcatttcattttggaaagtagtatgttttccagtatgaaataaataatttaataatatggggtattagctcagtcggtagagcacttgacttttaatcaagttgtccggggttcgaatccccgatgcctcatgaaaaaccttcaagtattttcttgaaggttttttatcttaaaaaagcttccaatttcaattattcaatatttatcttcaaattcggcccatccctcctcttcaggattagttttagccggatcgtattctggaacatccatatcgttttcttcggcagaatccttagagaatgaagtggaagcattttcattatcataattatcttcctctgaagtgtcataatattcttcatcatcagattcttcctctgaagtgtcataatattcttcatcatcagattcttcttttacattatcatcctctttattggtaagtttatccttattttctgcatcagaagatgtttttgaaggagctgatgtaggtgagactgcaggcgatacagaggatgtatcagaagaggcttttgtatcagacggtgcagaagattttgtactggaacatcctaatgctgaaaatgagatgagagtaagtattgctgcgctaagtatcagttttttcttatacatggaaaaatcctcctgtttttataatgatgtggttattatacgcttttgtactgggattttgtaaaatacagagtccatttttctagggactataataaaaaatcaaattttgtggttctatatttctaaataccctgcatagagttatagtacctgaaacatagcagggaaggcgcagtcctgctgggacaggcatcagaataaggagggctattatgagaggattaaaagaatttttctgtaagatagttgctgctgtaatctgttttggaatgaaagtgttttccggaagtatatttgagaacatactgaaagaaaaaaatgcgtcaatttatccgaaaatagaagaaaacagaatatatggaaacaataaagggcaggccggcagcgtgtgtactgaaatgacaagctctgtagctgatgaattatcttatacagggaatagtataaataaaagccaatatcatttatttctgaagagggtcttttactggcttcagggacccggtgacagactatataatagtaaatcttccagtgaaaataaggatttggaacgaaaaaagaagatgttgtttcatttagttcctgaataaaacggtaacttgacattccggaagcttcgggttgtgtgattgaaataaaaatctatttactcctgtctggttttttataatccggacaggagtttttgtgccacaaccggatgatactttttgatattctgatcacacggtcagaatatctgccagccagaattgatgcatgtgtccatgcagtctgcatctggattgataagcggaactgaatggaaaaccgtccaataaatgatgaaataacaatatggttacagtatgttacagacaaacaatcttgtattagccggattctgtgatttatcaggaaagaaagaacttttttataaagtgactgcttataaaacattacaaagagacatatattaagacaaagtacatatgggaaaatatatgaagaaaagagaaaggttttggattcccggttttctgatgttattttttgtaccctatattggagtcatggcagtcaatggagtggaggctgcaattataaacagaactccccaaccggaagaatatattcctcttattctttccctgcagattccggatgattatgaaaaagaagcagtaaaggcacaggcggttatagccagaacaaattttttcaggaagattcaggagaaaaatatttccgatgtgctgggagagatcagcggagaaataaaaaaagaaaaaactgcgtgtttttttccggaaaaaatctatgaaaaagcggctgaagagacccgggggcaggtgctgatatcagagggtgaactgaaacttgttccctatcatgagatcagcaacggtcagacaagggatggaacacaggcctttcatgaccaagaatattcttatctgaaatctgtagacagcagcggagataaaaattctccattttatttaaacagtacatatataccggaacagcaaatgccttctgaattgaatatagagcaaagagacgccagcgggcatgtggtaagccttctggcagatgaggatattttggagggagaggcctttgcacagggaatgggactttcctcttcggattttagtattcagaaggtggggggagagtttcggttcctctgtaaaggaagaggacacggattgggattttcccaatatggaggaaatcagcttgccagggagggaaaaaactggaaagaaattctggaaacatattttcctgcaatggaagttgctgcatatgaagaataaaattccgggaataacggcaaatgttcatatactgaaagctgtcgcctgcttttctctgtgtgctgtatgtacacaggaaaggaagcccttggtattggctgcagattctattgtacgaaattctgtatttaatcattgacagataaatgggtaaatgaaagatctgtcaatgattaaaatatgcaaaagtattatagataccgttgaggtatggagacagacgcttcttttttgtctgtattatgtgatattggatatttgttcatttataaccactaaaagtgaatagactcaggtattctggacaccatataaatacagaaatgattataagcagaggtgaaaggaatatgacaaaaaacagaattgtaaagtatgccacaaacacagcccttttagcagttctggctgcagccggaattggagcttatcagcttggtacatcaaaaccagaggaaaatatccaggaagaacaggaatttgtggaaatggaacaaagtacagaggaagaacccatggtagatgtgggaactactgaggtagaagcggatatggaaaatacatccggagatctggcaggaacagaaatggaagacggagctaacggaaatgaggaagagcctttacaggaagaaaccgctgtggaggaaaacggtcagcagccggaggatggaacttttgctcaatcagaagaaaatacagtaacagatgcagcggcaggcgcagtagaagccccggtactgaatttttcggaagaaacacaaatggaatggccggtaaatggaaatatcctgcttgattataatatggatcagactgtatattttccaactctcgaccagtataaattaagtcctgctattgcagtgcaggcggctgagggggctccggtgctggcttctgtgcccggaacagtatattcgatcgaagaaaatgcacagacaggaacaacagtgacaatggaaataggaagcggctatcaggccgtatacgggcagcttaaagaccttgcagtagaagagggagccacagtggataaaggtactgtaattggctatattgcagctcctaccaagtattacagtgaagaaggaagtaatctttattttgcaatgaaaaaggacggagaaccggttgatccgatcgcctatcttccagaataaaaataagagatactgttctgttttctatggaactgttcacaaaaaataagaaacaacgtataataaaagcaggtgggaacaaaaatccgcagtcggcagttctcctacctgctttttatctttctgtgatatactttgtccggccggctgcttttatatagattcggggatgactgttggaatagagcgacagttatcctttacatatacctggatggagtgaaaaaatgaattacacatatatggtgcagtgtgcagacggaagcctttatacagggtggacaaactctctggaaaaacgtctgaaggctcacaatgagggaaaagacggggctaaatatacaaaggcaaagcgtccggtacaccttgcatattatgagggttttgctaccagagaagaggccatgagacgcgaatgcgaaataaaaaagcttaccagaaagcagaaagatgctttgagaaatttttagaaatgatattgtgtataagataagcaaggcaagaaagcggccaaaggtatttaagatatctgcacgatgtgcagatgtcttaaacgggatatgccgtaataaaaacagccatttgtctgataaaagctgtctgtcagacaaatggctatggggtttatattggcatggtggcaataaagaaatacattacaataaaatggcaggcgcttccaagcataataaacacatgaaagatttcatgagaaccaaagtttttatgtcgggcattgaagatcggaagctttaatccataaataataccgccaatggtataaatgattcctccggccagaagccagttaaagcctgctctgggaagcgcatggaagattggcacaaaagcaaggacacagagccatcccattccaatgtacagaacagaggaaacccatttcggacagttgatccacagtgctttcagaaggattcccacaatggctattgtccatacaagaccgcagagaatatagccgatcttattgtgaagtgcaatgagacatacaggtgtatagcttccggcgatcataataaaaatcatcatatgatctattttgcgaagtctgcggtttactttttctgtggagtctacagagtgataaacggtacttgctgtatagagaaggatcattgtcagtataaatactgcaagagcagtaatgtgcagagtatcttcagtccgcgctgcttttatgagaagcggagccgctcccgctgccgcaagaagtacggctatgccgtgggtgatagcgctccatggatctttcagtttcaatttcatgtaaatcgcctcctgatttaagtataacccagatgttttaagaagtagtatttaaaactacatattaagcatatgacaactatattacaaacatacataaaagtaaagggattttacagaattttaatattttttgattatcaaagtaagtttcatggaatacagtatagcccggacagaatcgtttttacgttcttttttaatcaaagcagaagatttaccagataaaggagaggatttcgtaaggcggttggagttaatttccgtcactgagcagagtgtttgatccgaaagaggggctttcgtaaggcggttggagttaatttccgtcactgagcagagtgtttgatctgaaggagagattttgcgaatggcggataatagatacgcgaaccgtgtaggaaacgtagagtgtcgcagatgttgtcattcgtgctgacagtgtaaagagaaggtgtatgaaaaaagtgtcaacgattacttgacagtaactatagaaagaatacagaaaaaatcagggtggtaatgataaaggcaatttgatagaatgataaaataaaggaaaagtccgtatatttcagatgatgttttgtaaagacgggcgaaaggtacgggaggtatcatgaatattaatgagattgcctggcttgccggagtatccagaacaacagtatccagatatctgaacaacggttatgtcagcgaagaaaaaaaggaaaaaatcaggaaagtgattgaggagacagggtatcagccgtcaactcaggcgcagatgcttcgtacaaggaaaacaaagctggtaggagttgtactgcctaaaatcaattcagacacgatcagccgcgaggtagcaggaatcagtgatgttcttgcaaaaagagggtatcagatcattcttgcaaatacaaataatgatattgaggaggaactgaagtctctgtctcttttcagggacaatcaggtggacggagtgatttttattgccaccatgtttaccagaaagcataaacagatgctgaaggaatacaaagttcccattgtaattctgggacagtggctggagggatatccctgcgtttatcaggatgattattatgcttcttatatgataacagaaaaacttctggaaaaaggtcagaacgcggcatatatcggggttacagacagagacgaagcagttggagcaaaacggcgcaaaggatttgaggctgctcttcataagaaaaaggttcctgttgtgcccgagcgaatgaaaatcggcaattttaccatggaatcaggatatgagtgtgcaaaagagcttttgcagcagacccctcttattgattctctgatctgcgccacagatacaatggctgtgggggcaattacctgtataaaggaactggggctgaggattccgcaggatatacaggttgtgggaattggagacagttcttttggcaaaataattgaaccaaagctgacaactgtacattttttttataaaacaagcggtatggaggcagcatctatgcttgcagatctgatggaaaacgaagaaggaatcagaaaagaaattaaaatgggatgtgaaatcgttctcagaaattcacatagagaaaactgaatgatgtaagaaaattctcaaaagcagggagagtctgggtaaacaaagccagatcttcctgcttttatttgccaggaaagcagcatattttgtacggacttttccggtcaataaaagcgcttcattttgttttttaccgggaaaagaacggatattttggtgattatatacaatttttgtcatggagatttattggtttttacggctttacaatcagagaatacaggaatataataaaaacaagatatgagaacgattccatataataaacaggcataaaataataaaaaataataaaatacgaaataaattatatggaaacgataacataataaaaaggaggaagttatggactacagaaaaacggcccgggaaatttatgagcatgtaggaaaaaaggaaaacattatttcagcagctcactgcgctacccgtctccggcttgtaattgcagacaatgaaaaagcagataaggatgcagtagaaaatatcaatggagtaaaaggcgtattttttgcacagggacaaatgcagatcattctgggtacaggagttgtaaataaggtttatgatgagtttatccagattgcaggaatttctgaaagcagcaaagaggagctgaaacaggtggctgcctccagagcaaatctgttccagaggctgataaaaactctgggagatatttttgttcccattattccggctattgttgcaagcggtttccttatgggtattatggaagcccttaactttatggtcaataacggatatctgaatattgataccagtggttctatttatacgtttgcacagctgttcagcaatacggcatataccttcctgcctattctgattgcttacagcgccggaaaagtatttggagcaaatccatatctggcagcagtaatcggcatgatcatgatacatccgaatcttcagaatgcatggacagttgctacagaaggtgttcaggcaacccagaaagtgtggttcggactttattctattgatatggttggatatcagggacatgtgatccctgttgtgatcgcagtgtgggtactggctcagattgagaaaaagcttcataaaatagttcctgcaatgctggatctttttgtgacacctctggtaagtgtttttgtaacgggatatctgaccttatctattatcggcccgatttttgtaaccattgaaaacggacttctggatggtgtacagtgtctgatcgcacttccttttggaatcggaagctttattatgggagctttttatgcgcctacagttgtggcaggcgttcatcatatgtacacgatcattgaccttggacagattgcaaaatttggaatgactttctggctgccacttgcttccgcggcaaatctggcacagggcggagcagcgctggcagtggcgctgaaaacaaaagatcagaaaattaagtctatggcagttccgtctgcgctcagcgcatgtatgggaatcacagaacctgcgatttttggtgtaaatctccgctttggaaagccctttgttatggcatgtatcggaggcgcatgcggcgctttatttgcctctgtaacagcactgggggcaaccggaacaggagttaccggtattttcggtattcttctttgtctgaatcagcctttgtcttatcttctgatgatggcgatttccgtaggagtggcttttgttcttacatggatgtttggatataaagatcctgtttccggaacctgtcaggaatctgaaaaggaaaagactcagggagaaaaagctgcagcttcaaaactggaggttcaggaagctgcagcaggagaaattcttctgagcagtcatatggagggcgcggccattccaatgagtgaagtaaaagatgcaacctttgcatcagaggttcttggaaagggaattgccgtaatcccgaaaaagggagaggtaacagcgccgtgcgacgctgttgtggaaactgtttttgctaccagacacgctataggactgaaagcagacaatggagcggaaattttaatccatgttggaattaatacagtagagcttggcggaaaattttatacttcacatgtaaaagagggagaccgtgtaaggatcggacaggttatgcttacatttgatatggaaaaaatcaaagaggccggatatgatttgacaacgccaatgatcataacaaattcagacgattatcaggaaataaatattttaaaaacaggaaatgtaacaaagcaggatgcggtactggagataaaagaatcatgagtgcattaacaaaggtttttacagacgaaatcagaaaaattgaagaaacccactgggcagagatggtcagtaagccataccggcttacgcatcatctgatgcccccatgcggctggctgaatgatcccaatggcctcagctggtatcagggcagatatcacgtattttttcagtattctccttttgaggtaaagggcgggctgaaattctggggacattactccagtgaggatcttatcaactggacatatgaaggtgtttccctttatcctgacagtccggcagactgccatggtgtctattccggttctgctttggcagaagaagaaactctgcatttattttatacaggaaacgtaaagctggacggggattatgattatattaacaacggacgctgcgctaatacgcttcatgtggaaagtaaggacggcatagagtttgggataaaggaaaatgtgattccctgtactcagtatcctgaggattacacctgtcatatccgtgatcccaaggtatggaaggaaggcgacagatacagaatggttcttgggggaagaaggaaggatgatcacggagctgttttactttattcttcccgggatctgaaacagtggaatctggacggggaacttaccacagaagaaaaatttggctacatgtgggaatgtccggacatgtttgaactgagtgggaatgaaatcctttctgtatcgcctcagggtgtggaacgagaggaataccgttatcagaatatctacctttccggatattttattttaagagacggcaaagtattcaaagaagatttccgggaatgggatatgggctttgatttttatgcgcctcagacttttgtggataaaaaaggaagaagaatactgattggctggatgggaatgccagatgcggaaggagagtatgtaaataatacgctggaggaaggatggcagcattgtctgacagttccaagagaactgaaatactgtaacggaaaagtatatcagtatcctgtagaagagctgatgaatcttcggcgctggaaaaaaaagctttgtgacgcagacagagaaacagagacagacggcgcgtttgatctggaacttcaggttcagaaaggacctgcgaaagtagttcttgcagatatttttaagctggaatacagggacggaattctggttctggaaatggatcagcaggcaggggcaggccgccgaacaagaaaagcctgtattgaagaattgaggagtattcgaatacttgcagatacctctgcagcagaaatttatgtgaatgaaggagaagtggttttctccgtaagattttatggaaaaggaacaaagcacaggctgaaaatagaggcggaaggattcaggggaggaatctggaagctggaaaaaatgagcattacaagatgtttataacggattgacattgtttttcagattttgtataatagccagagttaaataattatgaaggcaggtatgttgatgtcggcagtgtcttgtaaagactgataaacaattgcatagaaaaaggatacacgcagaacgtgttttatttgtgtacccttttttcggtattcaggataccggttgtttttgcctgctgacagcagatatacggaacatatggattttcagataaattttgtatgcacagtccggagtatatttccggagagatttttatacacaaaatttatttctgataaaagaaattcagacgcagtttttgtcagtacaggcagagactgcgtttttgtatacgcttttagcacgtcttaaatatctacgcatcgtgcaggcatcctgaatggatcagtctttacacagggtattttttgatttataaagctttcataattaaggagaaccgattatcgtgataaaaacagaacatattttagaatttgataaaataaaagaaacctggaaaacttttgcgctgacagaaaacgccagaacagaaattgagaaaaccaagccaatgatgtcagaaagagaggttgcagcccggctgagagaaacctctgaagcaaaaaatatgatagaaaagttcggacagcctccgctggcagccatgagtaatatccgggaatggatgcatattgcggaaacaggtggctgtcttacaccggaacagcttgaggaagcagaaaaagctcttgtggcagtagagcggatgaaaaaatatctctgccagggaaaaaactatcatattcctctggcattttatgaggaaaatctatatagctttgaggatatcagggaggccatcagccagcagatccggggcggtcaggtatgcgacggagcatcacgtacgttaaaatcctgcagacaggacattgaaaaagaagaacgaaccatgagagaaaaggcagacaatgcgctccgggcaaacaaatcctgtatggcagacagcttcagcactttgcgaaatgggcatatctgcattccggtaaaatcagagtttaaaagcaggatcaagggaaatgttatcgatcgttccgcaaccggaagtacagtatttatagagccgacagcagcagcccgccactatgatgcacttcagcttctttacattgaggaagaaaatgaggtgcgccggattctttatgtacttacggatatgctttatcagcagaaagaagtaattgaacaggatctgtgcatgatagaaaaaatggattttattttttccaaagcaaagctcagtctggagtatgacggcacagagccggttatcaatacagagaggcggattgtaatcaaggacggacggcatccccttatggataaaaatatctgcgttcccctgcagttttctgttggaaacggagtgaatggaattgtgatcacgggaccgaatacaggcggaaaaaccgtggccctgaaaacagtagctctgaactgtatgatggctcagtctgggcttcacgtaacctgcagacaggcagaaatctgtatgaacagtaatttcctctgtgatatcggggacggacagaatctgtcagaaaatctttctacattttctgctcatatagccaatgttctggacatactgaaaaaagccggaagggaaagcctggtgatcatggatgaactgggatcgggtacagatccggccgagggaatgggaattgcagttgcaattctggaagaactgagaaacagtggagcgctttttctggtaacaacgcattatccggaggtaaaacagtatgcagatcggacagaaggcattcagaatgccagaatgacttttaaccgggaaaccctgaagccggaatatcagctggtgatcggcgaggcaggagaaagctgcgctttttatattgcaggaaaaatgggaatgccggagcatatgattaaaaatgccgctatggctgcatatggaaaggatgagcttcctgaggatctcagaaacctgacatcgggaaatcagttaaaaaaagaacgtacaggaggtattcaaaaacagaaaaatattttgtccacagcaaaagcaaagtttcatcccggggacagtgttatgatcctgccggataaaaaaatcggtattgtctgccagccggaaaatgaaaagggcgttttaagagttcagcttccaggcaagaagatttatattaatcacaaaagagtgaagcttgtggttgcagcagaaaaactttatccggaggactatgatttttctattatatttgatacggtagaaaatcgaaagctccgtcatcagctggatcgtggaaagatgatagaaaaagaaattacattagagtaaatgcataaaaatcctccatttacagatactatttccagaatcggaaagtacagtaaatggaggatttttatatgaaagctacgggaatcgtaaggcgtatagatgacctgggcagagtggtgatacctaaggaaatacgcagaacattaaggataaaagaaggaactccactggaaatttttacagacagagagggagagatcatcctgaaaaagtattctcccattggtgaactcagtacgtttgccagagagtatgcagaggctctggcacagacaacaggagttcttgtctgcattaccgatcacgatcaggttgtggcggctgcgggacatggaagcagagaaattgcaggaaaagagatcagccggcctctggagaaagttattgcggatagggaaggcaagtgttttaatcctggagaaaaaggaaaagttcctgttacagacagtcagaaagaaattttatatgcgcagatcattcagccgatcatttgcgccggagacgccataggagcagttattcttattggcaaaagtgaaaaggatatgtttggaaccccggagaaaatgctggtacagacagcggcaggatttctgggaagacagatggagcagtaaaaaaagagttattttgtcactgatacaggcatagaaaaaccaccctcagggtatcatatcataactttgaccagtgatatgataccttcagtctgggtggcattttctatgctaaacaatactacaggtcaacccccttgtgggcggttgtttcctctatgggttcaatataacatatctgaaaagaaagtacaagggtgatttctcagcacttctcagcaatttcatagatcagcttttcagtatcctcccatccaaggcagggatcggtgatggagcagcctggaatcatatgatcgctgatatcctggcggccttctaagagatagctttcgatcataacaccctttacaagctttttcaggtcggaattgtaattgcggctgtggagaacctcactgacaatacggatctgttctttatactgtttgccggagttggagtggttgacgtcaacaataacagccggatttttgagattccactgattatataattctgcaaggcgtacaagctcttcatagtgataatttggctgagtctggccgaatttatttacgccgcctctgaggatggtgtgggcaagctcgtttccgctggtagcaacatcaaatccccggtaaataaaatggtgggaatgctgggcagcggtaacggagtttaacataacagaaagatctccgctggtaggatttttcattcccacagggatatccattccacttgcagtaaggcggtgctgctggttttctacagagcgggcgccgatagcttcataagacagaatatcgtccagatagctgcgattttcaggataaagcatttcgtctgcggtagagagtccggtttctgccagcacacggatatgcattttgcggatggcaatgatgcctgccaggagatcaggagccttgtccggttccggctgatggagcatgcctttgtagccgtcgcctgtggtgcggggcttattggtatagactctcggaatgatcatcagtttatcggaaacctggtcgtttacttttttgagacggtttgcgtattcgcatacagtatcttcgttgtctgcagagcagggaccgaccagaacaacaaatttatcagactctccggtaaaaattttgcggatctcgctgtctctcagagattttactgatctgagctcatccgttaagggatactgttccttcagcacatcaggtaaaggaagctggtggttgatgttcattgacatgatagatttcctccgtaagtagattagttataaaatagttaactgcagataagctgcggcgtgttttattgttacagttcacatggcatttgaccaagttgctgtgaaggtcatgaacagtaaggttttgtttgcagcagcaattaaaatatgttctacattattttcataaaaaattcagtctgcagggtttcggatttttaataaaatgtgggaaaacctgcgggacagtactgtgtaaacaacagtggaaacttttatttacgaaacattcacagtatatcactttaaattggaaaagtccaccggattttcaagcatatgatattcttccagggtcagaccggtcagtgaaagataagaggcaagagatctggttacatagcggatatgccagggttcccatggaataccggtgatatgttctttatttttgggatatcgtataataaaaccaaaaagcgcagcatggcgattcagccagattccctcttttgtttctgcaaaggcttcagtcagctccatttgtactgcaggacaggacatgtccagcgcaagaccactctgatgctcactggagcccggaggcgccacataagaatcacctgtaaagagttctttctgacgcctgtaagaacggtaaccggagatacagtacagattcagtccctcggagcggctgcgtgtgatcagctcaagagcggagcgggctgttttttcttccagaagacgcttaggctctccgggaacagcatcaaagggcagtccgatatcaaccagatgctccggtataaaatcttcaggaagcggatgcttcctgttaatgagaatcgtgtaatctttgtccataaaaatccccccttaccttttatgatatgaaaggcagggaggggatatgcccctttaatcaagggccttttcgctcatttcctccagaagattttttttcagatcatagagcttctgagaaagatctacataaactttctgggggttgaccagacggcgggattcatcccagagagtttcctgctccttctggcagtatttgcgaagctccataacttcaggcgaggtgtaaatccgttttccctcccggatcaccgggataagaagttcacgaagctcataggtaccgcccagaacctttgtctttttccaggtatccaccggatcaaagatgatcatcgtttcttccgggtcaaaaatctcatcagccagacagatcaggtcggccttgatctttccggtttttttgctgtaaatacgataaacagttttatctccgggatttgttaccttttctgtattttcggaaagcttgattttgggtataaaagtattactgtcagtgtcttttactgcagcaagcttgtaaactccgccaaaagccgggttgtccttgctggtgatcagattggttcctacgccccaggaattgatttttgcatcctgagttttcagactgtcgatcagatattcgtccagatcactggaagctgcaatagtagcgtcatcaaaaccggcagcagcaagcattttgtacgcttctttggagagataggcaagatcgccgctgtcaatacggatgccgtattttgtcagtggaataccctcctctcgcatttcctcaaatacacggatggcattgggaacacctgatttcagtacatcataggtatccaccagaaggatgcaggaatcagggtacatttttgcataggttttaaatgcagtgtattcatccggaaaactcatgatccagctgtgagcatgagtaccaagaacaggaacatggaacatctgacctgtaagaacattggaggttccaacacagccggcgatcacagccgcgcgcgcgccgtaaatgcctgcatcaggtccctgagcgcggcgaagcccgaattccattactccgtctccgcgggctgcataacagactcttgccgctttggtggcaataagactctgatggttaatgatattaaggatcgctgtttctacaagctgcgcttccataacaggggcaattacttttacaataggttcccggggaaaaacaacagttccttccggaatcgcgtaaatatctcctgtaaaatgaaaggtgctgagatattccagaaaatcctcctgaaacatattcaggctgcgaagataagccacatcttcttctgtaaaacgaagattttcgatatattcgatcatctgctccagtccggctgtaatggcaaagctgcctccgcagggattggtacggtaaaacatatcaaaaatcacggtctggtttgtcgggtttttgaagtaaccctgcatcatggtcagttcatagagatcagtgagcagagtgagattatttgctctcatataatgtctcctttattgagaatgctttttgcttgtcttattatactttgctgatttaaagaaattatagtataaaaaacagcatgtttcaataaatctttataaaaagaaagcctgttccaggggagcgaaatggtctgcgaaaaattttttgaagaaatttaaaaaaaattaaaaaaaggggttgcatttttttttagactattatataataccacttgtcgcaagcgagaaacgacaaacaaaacatagggctatcgccaaacggtaaggcaacggactctgactccgtcatttcaaggttcgaatccttgtagccctgctaaatgagcatctttcagtttactggaagatgcttttttctgtataactgtcaggtcggcggtcatggcaggcaaaatacagttccctgaaacggaagatctcagggaactgttctgtaacggggttagttgctgttctgagtacacatctttaaaaattcttccatggcccggctgagataacggccttttttccagtaaaaacagatattgcggcagttgtccttcagaggcagcttgtaataaactacattgggattcggagtaacctttgttatcatgatatctccaataaaggaaatgcccatgccggagcaggtgacattgtaagaggtcatctgctggtccatttcaaaggtaatgacaggatcaaaatgatttttccggcagatttccaaagctctttttccagtatcattttcctgtttcagcataataaaaggttcttttttaaagcgtgacagagggacagagggaacctgcgaatccagaaattttcctgtctgaatgtcagaaacagaaagctgaaaatcccgaaggctgtcattaacagaaaaggagccaggcacagcaagaataaggtgttcttcctgataaagaatgctgtcaaaaatttccgggttcaggctggtattatccagtacaagatcaatacttccgctctggagcatttctgtaagctttactgtggattcttccacaagtctgatctgaatctgtggataaagagctgcaaaatcagccataagcgatggaagaatccacgaagaaaataaattactgcctcccaggatcagagttcctgttttcagccctccccagtcattgataaagtccgaaaaatctttttctatattcataatacgttctacacagcggatatactgttcaccgcattcagtaagcccaagaggtttcgtgcttctgtcaaacaccggatagccgatccgggactccacacgcctgacattggcgctgagagaaggctgggaaataaaaagatttgcggcagcctttgaaaaacttttttctttataaacttcataaacgtattccattccctgaaacatgacaattctcctttatataatttataaattataataattataaaaatatatgtatttgattatatattagcatattactataatggggacaatgaaaatgaacaggcacaaaatcggctgctgttaataaaggtttatcagcgaagacagtccggcaggaactttggatggaaaaagccaggaacagtggacggtaatcagcagctatgtgaaaatcaccggaatcagcagcaaataaaaaagattaacgggataaaaacctgcgttcatcagacagcaggaaaaatgcaaagggagaagaacaatgaacaaaaatggggaagcagagaagaaacaggattatcgtgtagagaaggattctataggaacaaaggatgttccacagaatgtgtattatggagtgcagtctctccgcgcagcagagaactttcatatcacagggctgaatatgcatcctgagatcataaacagtcttgcgtatattaaaaaagcggctgcaattaccaattgtgagatcggtatgctggataaaaagaaggcaaaagccattgtacaggcctgtgatgagattctggaaggaaagcttcacggtgactttattgtagatccgattcagggcggcgccggaacttccttaaatatgaatgcaaatgaggttattgccaaccgcgccatcgagattctgggaggagaaaagggtgattattccatcattaatcccaatgatgatgtaaactgtgggcagtctacaaatgacgtaattcctacagccggtaagatgacctctctcagacttctgaaaaacctgaaaaaagaacttcttcgtttacataaagcgctttgtgcaaaggcaaaggaatttgatcatgtaatcaaaatgggacgtacacagatgcaggatgcggttcctattcgtctgggtcaggaatttaatgcgtattctgttgcggttatgcgtgatatccaccgtatggacagagcgatggaggaaatgtgcactctcaatatgggaggaactgctgtggggacaggaattaatgcagatgaggcgtatctcagaagaatcgttcccaatctggtagaggtttccgatatggaatttgtgcaggcctatgacctgatagacgcaacacagaaccttgatccttttgttgccgtgtcaggtgcagtaaaagcctgtgcagtaactttatccaagattgccaatgatcttcgtctgctgtcatccggccccagagcaggatttggagagatcaatcttcctgccaagcagaacggttcatccattatgcccggtaaagttaatccggtaattcctgaggttgtcaaccaggttgcttttaatgttattggaaatgatgtgacgatcactatggcggcagaagcaggccagcttgagctgaatgcatttgaacctattgtattttactgtatgttccagtctattgatacgctggcatatgcagttcagacatttgtggataactgcgtaacaggaattacagcaaatgagacacgctgccggtatctggtagaaaacagcgtgggaatcattactgcgatctgtcctcatgtgggatatcagaaagctgcggacattgccaaaaaagcaatcaggacaggagagtctgtccgcagtctgatcctgaaagaaggacttttaaatgaagagcagcttgaccatgttcttgaccctgtaaatatgacagagccgggaatttcaggaaaagagattctcatggcaaatgataaataaaaaacgaaataaattatagattttgcagaaaaagtaaaaggatccctttttggcactcagaaaaatatctgatgatgccggaaagggatttttgtatacagaaatgaagatgcatcgatatgccaggatcacgacacacagggaaaaatgctattgccgaagatgacaggggatacattttgaccaagttattatgaaggtagtgaacagtgacgttaaatctgcccttgcagtgtatagtttcagtggatataattaagaaaaaatgtattgaaacagaaaagaggacgtaatatggcatacagtttcagcggaagagtccgctacagtgaaatcggagaaaacggtcttttaactttgcctgggatactgaattattttcaggactgcagtactttccattcagaggcagcagggcttggggtaaaggttctgaaggaaaaaaataaattctgggtactttctgcatggcaggtgattgtaaaccgttatccgtatctgggagaagaaatcgttacttcaacatggccttatggattccggggatttatgggattccgtaattttaccatggatacagcagaaggggagaggcttgcctacgccaatacgttctggacgtttattgacgggaaaaacggactgccctgcaagctcagtgctgaatatacagagggatatggtctggaagaaaagctggatatggaatatgcatccagaaaaataatcctgccggagacttttgcgggagaggaagcttttcctgtgcagaaacatcatctggataccaatcaccatgtaaacaactgccagtatattcagatggcaatggattatcttcctgtggattttaaaatcagacagatgcgggctgaatataagcagcaggcccggcttcacgacacgatctgtccggaaaagtcagtagatggggataaaattgtgattaaactgaatgatacagaggcagagccgtatgcggtagtggagtttgtgaggtagttaaacgataatgggggatatttttactgcagaaactattaagaaagtggaggtatataaattatgggaaaatcttatcagaagcaatggacaggagtgtttggtgatccggtagatgataatccaacagttgtgatggagcaggcggcttttgacgcagctgggattccaatggagtatcttacgattcaggtaaaaaaaggagatctggaagcggcggtacagggcatgagggcaatgaactttacgggaatcaatattactatgcctcataagggagaagtacttcagtatctggatgaaatatcggaaagtgcccgtattatgggagctgttaatacagtttattggaagaatggtaaattggcaggagaaaacacagacgggaaaggttttctgaaaagtatccaggacggagaagttccgattaagggaaagaaagctgtgattttaggtgctggaggcgcagcaagagctattgcagtggaattggcagatgcaggaattaaaacagtgactgtaattaataaaaacaaagctcatggacaggctttggccgatatcattaacacaaaaaccaatgcagagggagtttttattccatgggagaacagtgtccatattccggaagatacagatattctcatcaatgctacacctgtgggatttacagatgataaaaagccagatattgtttatgaagatatgaaagctggaatgacagtatgtgatgtgattcccaataaggcatggacaggttttcttttggaggcaaaagaaaaagggctgcgtacgtttaacggacttcaaatgcttgtcaatcagggggcgattgcatttgaattgtggacaggggagcctgctccggtggatgttatgcgggaagctatggaaaaagagtatggtgtggaacttttttagagaaagtcagaaaaaatacgtaaaataacgtttttttgaaaaaaaggatgcttgtgtcgcataaaagaattttgtataattttggtatagaagttaaaatcgcagacatcagttataacggtgcagtatattttatgcgagagatttttataggatattttatacgaaagaaagaactgccgcagcaaaaaatatatctgtggcaggctgaatgaaaaggtgaaaccatgagtgggattaaagatgtggcaaagcgggcaggcgtttcaatatcaacagtttcaaatgttctgaataaatctaaatatgttagtccggaattggtacggagagttgaattggcagtggaggagctgtcttacgaggcaaatcccattgctcgcagtatgaagaataataaaacaggaaccattggtgtaataacggaagatatctgtggagtattttatccttatgtggtaaagggaattaattccgtggcagacgaaaaaggatatcagatcatgatctgcgatgctcagggcacttatggagataagcaggcaataaaaagggaaaaagaactgtttcgtcgtatgattgccagcagagttgacggtattatttttgtttcgtctgtgtctacagaaaacagagaaaaatatttcagtcagattaaaaaacaggcaaataaatataaaaacattccattggtaagtatagaaagagatttaaccagcgtaggaattgattctgtatattttgacggttatgcaaatgccagaatggcaacacagcatcttattgaatgtggatgtaaaaaaattgggcatattacaggacctacccatatggaaattgtcaaagaacgagtaaagggatataaagattgtttgaaagaaaataatttatatttgggcgaagaaatgattgctcatggcgattatagccatttgagcggctatgtggcagtaaaacagcttatggaacaggtccctgatatggatggattattttgtggaaatgatcagatggcaataggggttatgaaatatctgaatgaacatgaaaagagaattccggaagatattaaattgctgggttatgacgatgtgtttctggcaagtgtggtagaaccgtctctttcgacaattcatgtaagaaaacgtcatgcaggaattgaggctgcaaaaatgctttttaaaagaatagagaatccaaatgaaaatttcggacagccggtaggaataaagatggacgccagattagtagtgcgtcaatcaactgtaaaaacagcttcaggggactgggatttagtggattggtgagaggggcaaaagcccctcttaaatttttattttaatacgggaagatggaaaataacagttgttcctttatcaggaagagaaagtattttcatatctgcactttttccataaaatagacttaaacgttcttttacgttatttagtcctataagatgggaaggagcagactcttcccggcaatgataaatagttgctaaattttttttctctattccgataccgttatcttttatggagcaaattaatatattttgcttttgtttgattgtaatccagatatggggattagttttgttgcttttaaagccatgaagaattgaattttcaataataggctgaaaaagcatttttaatacacgacattcatatgtaggatttcttatataaatatccagaatgattttttgtgggatatgtagctgcataacttgaagatattcttgtaaatattctaattcttctcttaatgtaaaatagtcatctccagtttttaaggttttttctaatagtttcccaaaagaagagatggtatttgcaactggggtatctttatttagcaaagccatccatttaatgttatttaaagtattaaacatcaggtgcggattgatttgggattgtagaatcatgtaacgaaaacgttccttttcgttttcctgttccagcagcttttgttgctgtgtctgagtacgtttgaaaagagcatccagttttgtagtcatatgattgaaactatttcccagatcagctaattcgtcagaagaggagctatgaaattggcaggaaaaatcacccttttcaacttttatcattaaatcctttaaggtttgaattggacgtagaaaagaatgaaggataaaaatgattgcaaagattacacaaacagtaagggtaatatcaattcctataaatatattgctgtaagaaacctctttataaagaagctttttaggaatcatggaaatgaaattccagttgttatataaagaacaggaaagaacataattattattattatttttgtaggactcataggactgccctatgagtgttttatcctgggcagagataatagtattgttttcgtcacacagaagatggatacttccctgatataacgtagaggattgaagaatacggaaaagtttttcctcatctacgataagtattgcttttccaagatattgttttttataatttcgtatattttttccaatgcacaataccatattatttgaatcgctgccaagattcttcatggatgttgagaagtaggtataattaagatcttttttgttaatatttttaagatgataagcagtttcaggagtgttccacacatcaggattgctgatgtaatatgtactgtaggtagtattttgtctgtctaggatgataaaatctacaggacagtaaaagacaaatttttgaaactgtgatgtgagattatcaatggatatttttgtttttaactcatcattcaaggactttttttctgtttccagtgctttatagagagagggagttgtggaaagaagatttaaagtaactcccatttctctcataagagttttcagagtgttgtttacatttgtaacagcattttgaaaagcaaagtctgtatttttcagtaattggttttccagttgaagttggagaagcaagttaatagctatgacagggataattacaaaagtaagaatacagattgtgattttactttgaagtttatgaaaatattttttcatacgaacctcctgatttataatggattggagacatgccagtagactttttaaatacttttccaaaatatccagtatcgttaaatcccgtcatttctgcaatttctgcaatcgtgtatgtctgaggcgatgtcagaagcagttttgctttgttaattcgtacttccgttagataatcgttaaaggaatgtcccgtttcctttcgaaataaatagctgaaatgatttttgctcatatgaatatgagaagcaataccggatagagaaatattttcactatagtgttcttctatatattttaaagctttagcaatatctgaacgaattcctttataatataaagattcgtaagaaatatcagatagtgatttttgttgctgctttataatttttttggcaacatccgaaatgatggtagatatttcatcaggtgttgcagaaagtttgggaatatagtctcttactcctttcttaaatgcatttcgtacatgagtgtaatcttcatggcaactgagaataataatatttgtttttatatttaaatcttctaatttttgtagaagttccattccagtcatttctggcattatcaaatcaagaagaatgatgtcaggagtatcttgaagtataatctgcagagcttcctgtccatttgaagcttccccaattaattggagttcaagcattttccagtttatgcaattaattaaaccagcacgaacgataaattcatcgtcaacgattaagacttttaacatatgtaacactcccttgttttggaaaaaggtttttttgatatataaatattatatattattttgccgtggtttgacaataaaacataaaaaaacatattattttactatttttcgttattatttccaaattataaataaaattcgtattaatcttcaattttatcagatgtatcttcattgtccaaaaacagagaatatgtgacaataataacatcaaataaatgacaggaggaaaaaagaatgaaaaaaagaataaaaaaattattgagtataaccttaagtgcatgcatgattttacctgttttttcggtatcagtggtagaagccaaaccggaagaaactattcgcgtctggtattgggaagataatgatggctcttatgcggatgcatatgatacatggagtgaacaatatcccgatgtaaatttggaattggaggctattccatggaacagttatcatgataccctgattgcagctgcagcatctggagatcttccagatgtgtataaaattcagcctacctggattccagagttgaggagtttaaatgcagttgctaaattagacgaatatattgattcatgggaagataaagatacaattccggaaagtatgtgggaatcggcaagagcgggacaggaagaaacatatgcatggccccatagtttggttgtactgtatctctattgtaggaagtcatatttcgaagatgcaggacttgaatatccaaaaacaatggatgaattttatcaggcatgtgaagcattaacaaaggatacagatggagatggctctactgacatatacggattcagtatgcgcggtgcccgtggcggtcattttatgtgggcaggtcttacgttaaatgaaggaatagacttttttgatgatgcaggaaaagtaagcttgaatacacctgaaatggtggaggcaaaccagaagtatctggatatttaccagaaagggtgggccccaaaaacagcacctacagatggctatacagaaattgtgcagaatttcgaaagcggagttacaggaatgttggtacatcatttgaattccgcaaaagaaatcacggaagtattgggagatgatgtggatgttgtggcgcttccagaaggagcagcaggcagatatctcccaagtgaaccatgtcattgggctgtttccgcaaatagtgagagtacagaagaagcagtgaattttcttaaatatgcgtcaggggaagaggcacataaggagttatgtaaaaatgcagggcttgttccatttgtgacaccagttacagaggatccagaatttacaggagataaattctgtgcagcctcgatggaatatcttgacgatgtacagatttttccggttgtaaatacctggggggactggtcagaaactgtatggcctcaaacaattcagcgggcaatgatgggagagattgacagtgcagagatgatgcagattctggcagataatcttgcaggagaataaagatgtggggctgtattaaaatacagcccccgaaatttcagggggaatatcttatgatgaaaaaaaagaaatttcagtatcagccattcattctcttagcaccggctatattaatcgtaattcttattattggctatcctgttgttcgtgcggttgttttgagtttgtataaatatgatttaacaaatcttcaaggtgttaaatttgtgggattgcagaattatattgacatttttacaaaagaccctgcgttttggccagcatttaagaatacagtaatctgggttagcgttacagtgatttctcagcttttattatctctgttacttgcaaatattttaaataaattttttattggtagaggaattgtccggtctgttgtattaataccgtgggtaactccttgtgtgctgatctctcttatgtgggcgtggatttttaatggtaattatggagttatgaatgagattctgcaaaagctacatttgatcaatgaaaatgttgcttggattgcccaacctaatacagcactatggattcagattcttgcaatgatatggcagggaattccattttttacaattatgattctcgcggctatgcagtcggttcctcgggaactttatgaatctgccagtgtagatggagcgtcaagaattaaacagtatttttatattacgattccgggtattgcgtcaacaattgtttcgacagtaatgatccgtttgatatgggtatttaacaatgtggatattatttataccatgacgggagggggacctggatatagctctcttacattatctgtatatacgtatcttcaggcacaaaaatcaatgaaattcggatatggaagtgctgtagctattattggcgccgtatttatgtcaatagtaatatttatttatctcaggataacaagagaacagggaggaatgatagataaatgagacagagaaagagtatatggactttttacataccaattgtattttttatggtgacagttttattcccatttgcatggattctcttgacttcattaaaggagaagaaagagatgttttcagcagaattccattttttgccattggaaccaacgctgaacagttatagagagctatttgagaaaacagattttattcataacatgtggaatagcttggttgtttcttttgtaacggtgcttattgcaggaatagtatcatttatggcaggatatgcattgtcaagatacagatttaaaatcaggaatggacttatgtatttttttcttcttttgtatttggtgccaagtacgctacttttgattccactatatacaatttttaataagatgggaattctccatacacagttatgtcttattattgcatatagtacgtattctataccgtattctgtatggctcacaaccggatttattaatcaagtgccatatgaactagaggaagcagcagctcttgatggctgtaatctttttcaaaggatgataagaattgttcttccgcttctaagaccggcaatggtagcttctttaagttttatttttattacatcctggaatgaatacacttatgcaaatatgtttaccaataaagattccagaacggtgacagtagctttatcaaattttatgtctcaatataatatacggtgggatttgattacggcaggaggaattatagtagttataccggttgttattatgtttgtcatcgtgcaaaaagatttgattgcaggtttaacagcaggaggcgtgaaaggttaggtgaaaatgaaatgaaaaaaatggatcagatctgttatattgtgcatgaaacagataatgtagctactgcgatggaggatgttacagcaggagatattaaacttaccggagaaaataagaatagaaaaggagaaatgattgcactgcaacaaattccatttggacataaggtcgcactttgcgatatggaagagggagatcaaattttaaaatatggtgtttgtattggtattgctacaaagaagataaggaaaggcatgcatgttcatcttcataatatgaagagtgcatatgatttccggtcagcgcagctagatccggttactgtacatgcgaaagatatagaatacaaaatgtattagggaggatgacgcatgaacgaaaagattttatgtcagggatatcaaagaagagatggaacaaagggaattagaaataaagtgctgattgtgtttactgtggaatgcagtaaatatgtatgtaggaaaatcgcagaatattttcagaatattggagaagatgtggagactataggttctcattcctgtcttcataatcaagtaaatatacgaagaatgctgaaatattgtactcacccaaatgtgggaggtgtactggttatagggcatggatgtgaatatacatatccatctatgctggcaaaggaagcagaacggtcaggaagagaggcggcatggttttaccagcaagaagcaggtgggacgaaaaaaagtattataaggggaattacaatcgtacaggatatgcttgacaaattaaagaatgttccaagaattcctatgtatattcaggatcttgttataggaggcgagtgtggaggctcagattttacctcaggattagcggggaatgcattgattggaagtgtttttgattatgtggcagatcatgggggaactgctgtctttgaagaactaagcgaaggaattgggctaaaagattatcttgtgagcagaggaattgatgataaggtaaaacaggacattgcaaatgcttatgataaaacagtggatttttgttcggcatatggtcagttttctattgctccaggaaatatggatgggggattaacaactattgaagaaaagagcatgggagctatggtgaagagtggaagaagacctattcagagtgttctaaaaattgcacagtcaccaacaagaaaaggggttcatctcctggatgttattcctgatgaaaaattggaaccagcgcattttatagcggcagatccttctgatatgttagatctcatagcggcaggatgtcatattgtatttcttgtaacaggaagggggcatgtggtaggaactcctgttagtcctgttgtcaaagtaacaggaaatccgagaacttataacagaatgcaggacgatattgatttttgtgcggcgggacttcttgatggaactgaaagcatgtctgatatgacggaacgaatgctaaagaagcttagaagtatttgttgtggtagacttacaaatgcagaaaaaatggggcacagagaaggtattctctattttaattatcaggatcctgtcaatgttccaaaatgttggcagttttaggagaggagtataatggatacaaaagaaagactcagaggaattattcctccgttagtgacacctcttgatgaaaatagaaatatagataaaaagtcattgaaaaagctaattgattattgtatagatggtggcgtatccgggatttttgtgttgggatcttgtggtgaaggatcagctctgggtattgaaaagaaaaaaacagtagttaaatatgcattgaagtatattaatggaagagttcctcttttggttggggcgctggaaacctcttcagaaaaagttctggaagagataaaaatatatgagaatttgggggcgaaatattttgtttcagcagtgccttattatcttgagccagaagatcagaagggaattatcaaacattatcagtttttaacagaaaatattaagggaaaattgattgcgtataatattccatcttacgttcactatgatattttgccacaaacaatgaaatatctcttaaaatttccgaggctgatagcaataaaagacagcacaagtaactggagcttgtttcaaaaagcattagttttaaataaaacaggcggaatgttaagtggaaacgaagatttatgcggagccgccttaatatttggtgcagatggctgtgttccatgtttggcaaatgcttatccgaacttttattctaaattatatagatgtgctggtgaaggaaatatagaagggataaaagaatgtcaggaagcaattatacaaatgaaaaaagtattggagttttcaaagaattggattgctgttgtaaaatatctctgttttcgaaagggactgatgcagccatatacatcattcgatgtttctgagttaagcaaggaagaaaaggagaatatagaagactacctaatgaaaaatgagtatagttttacaaaaaaataattttaattaagatagctgctaagaatcgaaaatattcttagcagctattttaaattttattaataaaatatataaatttaatacaaaattaaaactaagaaacgtttttctgaatatatttacaaataatataacttaatactgtgcattttgcacagatttaatgtagaaaaacgttttaatttgcacaaaaaataatttttttagaaattttaattgacaaaaacgtttttctagattatcatgtaaccaacttgaacaagaaaagaaaggaaaccagaatccatatgtaagaaatgcacaataaaattatggatttatttttttaaatcacagaaaaacgttttaccaaagcaacagataaagggaggaattatatgacagaaaaaatgagaatggctgagcaggctttggaacaggggaagggaatcttacgtctggcaccgacatgggttccgcgttcgttctgcagaccaggaaaaaggataaaactccacccggatgattactttatattgggacagagaggcggaatcgatgagagatggttttcttctacaacatgggcagaaaatggacctgatactccggaagacgagggattaagctatgttgttgtagatgaggaggggaaagacagagttcttctcagggatgtagttgaattgctgggttcggagattataggagaagtactttggagcaagtatcacagatgggcaatgttttccaagttttttgataatgcaggtcctctgccccaccatattcatcacagaacagaacatgcagccagagttggggcagatggaaaaccggaaatgtatttcttcccttctcagatgaataatcatggaggtgaatttccttttacattctttggttttaatccggaaacaacaaaagaagaggtgcttgaagcactgaaaaattttccgaagggagacaacaagattctttctctggcaatggcttataagttagatcttgatacaggttgggatgttcctccgggagttatgcatgcaccgggtagtctttgtacttatgaacctcagtttgcatctgatgtatatgcaatgtatcagtcagttctcatgaatggacagattgtcggagaagatctcctctggaaaaatactccggagaaagaagttggtaattatgagtatttacttgatgtgattgactgggagagaaacgtagatccggaatttcataagaaccgtttcatgaggccgattccagtgaagccgatggaggatatgctggcagatggttatatagaggaatggatttgttataaatgtgagacagtcagtgcaaagcgtctgacgattcttccgggacgcagcgtaacgattaaagacaacgcgccatatggcctgatttgtctggagggtcatggaacatttggtaaatgggagatagagtctcctgctctgatccgttatggtgagttgacgcatgacgagtattttgttacagaacaagcggcaaaagagggagtggtaataacaaatccctcccttacagatccgattgtcatactgaagcatttttcagataatccggatctgatcattcaataaagacttaaaggaggagaggaattttggcaggtaaatacatactggaagccacgggaattatgaaatctttctccggagtgactgttcttaatggcgcagaattgtgtattgagcccggtgaacttcatgcactgatgggagagaacggtgcaggaaaatctactttaatgaagattatcatgggtatttacacaaaagatgccggaaaggtaatactggatggaaaggaagtagaattcaaatcagccagagatgcccttgatgctggtatatccatgattcatcaggaattaagcccgattccggagatgacagttgcagagaatgtatttttaggcagggagcaaaaaaagataaaaggtctgccttttgtagataaaaaggagttaaacaggaaaacacaggaacttcttgaggaatataatctggagcagtttatccgaccttccatgaaaatgaaggatttgaatattgcacagattcagatgatggaaattattaaggctgtttcctataattcaaaagtaattattatggatgaaccaacttcatctctttcagaaaaagagacagagacactttttgagattattgacagtcttagaaaaaaagatgttggaattatttatatttctcatcgtatggaagaagtatttcagctggcagaccgtgtttctgtccttcgtgacggacagttcataggatgtgtgaaggttaaagatgcatccagagaacagctgattaatatgatggtaggacgtgaactggagggaggatatccacgaaatactgctcaaaaaggtgaagttgtactggaattgaaaaattttaccagaaaaggcgtattcgaaaacgtaaatctgaaagtgcatgcaggagaaattcttggtatggcaggtcttgtgggagccggacgaagtgaggttatgaaagcactggtaggttatgatcctcttgacaccggggaaatttatctggacggacaaaaaatatcaatcaaacatcctcacgatgcaatcagacatcatattgttatggcttctgaggacagaaaagaacttggattagtactttgtcgaagtattaaggaaaatgtatcacttcagaactttgataagctttcaagtgcatcatttattcagaaaataaaggaaaagaagatggcatctgaatatacggaaaagatgtctacaaaaatgaacggtactgatgatctggtgtcaagtctttccggtggaaatcaacagaaggttgtacttgcaaaatgcctgttgtcagatccaaaagtgcttattatggatgaaccaaccaggggaattgatgtaggtgccaaggctgctatatataagattatggttggactggcagaacagggaatcgcaattataatgatttcctcagaaatgcctgaattgattggaatgagtgacagaatcatagttatgtcaggcggtaagatcagaggcgagctggagggtcaggaagcgcagtctcagcagacaattatgaatttagcatttggaggagaataaaatggcacagaaaaaagatatgggcaaaattctgaggcagtttggccttgtgtttgtggctcttattatcattatttttatgagtataacatcagatgtatttctgacaagtcagaatattataaacattctgagacagatttccattaatggtattctggcagtaggtatgacatttgttattctgacaggaggtattgacctttctgtaggttctgtagttgctattacaggagttattgtaggttctcttttacagagtggtacaaactggtttcttgcaagccttgcagcgctggcaatttccatggtctgcggagcgattaatggctggttgatttcttatgtgggatttcagccgtttattgcaaccttatcaacaatgactattggaagaggatttgcgcaggtatattccaatggaaaaccttatacaatttctgatccgtcctttaaggtaattggtcaggggaattttcttggaataccggtaccaattatccttcttataattttctgtgtaattggaatgattattttgaccatgacaacttttggacggtacgtatttgcaattggtggaaacattaatgcggcaaagctttccggtgtgcggactcagagagtgcagttaatggtttatgtcctgtcttctgtatgtgcctggatggttggtctgattctggcagcccgtatcagttccggacagccgactgcaggagaatcttacgaaatggatgccattgcagcgacagcaattggcggaaccagtatgaatggaggaattggttccctgacaggaacgatttgcggattcgtaattcttggacttttgcagaactccatgaaccttatgaacattaattctttctggcagcagattgtaaaaggtcttctgatcattattgcagtattccttgatatgagaacaaagggaaagaaaaactgataaatatgaacttaatatcgtgaagatattaaaaaatacatttatttattaaggaggaataaggaaatgaaaaaacagattattggtggtttactggcagtatcaatggtagcttctatgggaacaatgagtgtggcagcagcagaaaaggataatgcagatattaaaattggattttcttcaaaagataattcagatacttttgtagctgcaattgcagacgcagcggaagcgagagcgaaagagcttggcgtagagcttctgatgtatgatgccggcggtgatgtaaacaaacagatcagtgactgtgagactcttcttgcggcaggcgtggatgctctggttgtaattcctcagagtgtggagggaagcgcaccggtagtcggaatggcaaacgatgcaggcgttccaatcattgtagataatggagatattggagataccaattatacagcatttgtaggatgtacagatcaggaatcaggagagcttctgggaaaatggtttattgaagaatccggcctgaaggaaggcgataaagtagctattattgaaggacctatgggacagtccggacaggttggacgtatggccggatttgaggaggtcggacttctggattactttgatgttgtagcaactcagacagcaaactggaaacgtgatgaagcaatggcacttgcagaggactggattacaacttatggtgaagatctgaaggctattatctgcgaaaatgatgatatgggtatgggtgctctttcagcagctcaggcagcaggccgcgacgatattatcattggcggtgtagatggtcttgaggatgctgtacaggcagtaaaagacggaacctatggagtaagtgttcttcaggattctgcaggacagggagctacaggcgttgatgttgcagttgcggcagccaagggagaagaaattgcaaaagatacaagaattccgttccgtcctatcacaaaagacaatgttgacgcttatctggaaggcggcgtagaggctatttccggtgatgctgcagaaacaaaggaagaagcagcagaagaaacaacagagggagaaaccgaagaaaaagcagcggaagaggaagctgctgaataagtacaaaagaatataagacctgaatgatatgagcaaggcaccgctggcaaagaaaataatggaaaggactttgcggcggtgctttgtgcgccaaaaatccggtatattttgtcggaaagcagagaaaggagaaccgatatgcttagaaatattcccaaaattattccaccggagctggttaagacaatgatggaaatgggacattcagatgtactgatcattgcagatgccaattttccggggacagctcatgcaaaaaagataatccgtatggacggtattatgattccggagcttttagaggcagtactgcagctgtttccgttggataatttcatagaaaatccagtgcgccttatgagaaaccttcctacagagccggttccggaaatctgggaaacttatagggagctgctgaaaaaatatgataaagatgatgcctttcacgactttgaatttattgacagacttccgttttataaaactgcagaggaggcttttgtgatcgttcagacaggggatgaatctcgatatggaaatattatcctgcagaaaggagtctgctgagcatttatgaattatcaggaagaaaaaaagtatgtgggacacagagaccagcttatgcgtataaagcggttcagaatgcaggaaggtaaagcggaaggggtggaacttctggatgttcagaatcgttcgggaatgcattttgatgtgaatgtaagccggggaatggatatcccttatctggacttctgcggagaaaatataggcttcgtttcaccctgcgggattgtttcacctgagtattttgatgacaaggagcttggttttctgaaaagctttacagccgggtttcttacaacctgcggtctgaaggttgcaggtgcgccctgtgaatatgagggaactttttatggacttcatggaaatctttctcatattccggcagaagaggtcagtgcagtaattgaagaaaatggagattctccatgtgcggtaatgaaaggaaaagtccgagatgcagtgattttcggggacaaaatgtgtctggaaagagagattcgatgttcttataaggaaagaaaaattacgctgaaggacagggttacaaatgaaggatttaaaagagtccgtcagatgattctgtatcactgcaatatcggatatcctgtcctttctccggacagtgagatttttattccggcattggagacaaaggctaggaatgttcatgctcaggaaggtattgacagctggatgaaggtgcaggaagcagatgctgattatgaggaaatgtgttattaccataagctgaaaccggatgagaaaaatcattcagtagcagctgtttacaatccggatctggatctgggaattgctattgagattgatctcagcacactggatcatttcgtgcagtggaaaatgatgggagcaggagactatgtaatgggtctggaaccgtctaattccaccatagatggaatagatgacgcagtaaaaaatggatcaatgaaatacctggagccgggagaaacaagagaatatactcttacttttcatattctgaagggaagaaaagaatttgaggaattaaagaaaagaacagaaaaataaggaggcagaaataatgacagaaaaagaactgattattaaggcaggagaagaattagacgcaaagcttgctgaggcgaaaaaaacagggaatcttgtggtgaaagatgcaacagagaacgaaagtgtaatcaggtctacatttgaaaaaggagaaggaatcttcagactgtttccggcatttgtgcccagaagatttggaaaagcaggacgcaggctgaaacttcatccggatgattattttgcatttggaatggcaagaggttctattacggagagatggtttgcatcaacgatcgcggctcagaacggtgagacagctaaggctgatgaaggtatggcttatgtatgcgtggattataacagcgatgagaagttttctctgagaaatgcagtgaaggttctgggagaagagctggttggaaaagaactgatggaaaaatataatggatggccaatgtattccaagttttttgacaatgaaaatccattattccaccatcttcatctgacgtttgaggacgcagcgcgagtaggcaagcttggaaaaccggaatgctattatttcccaaaacagatgaataattattttggagaagccaattatacatattttggatttgatccggacgtagatccggaggagatcaaagacagaatcagaagctttaaagatgatgataccagaattactgatctttcaagagcgtacagaatagaactgggaacaggctggtacactccagcaggtgtgatccatgcgccggcttctgtactgacatatgagcctcagtggaattctgacgtaaactctgtttacgaaaatattgtttccggagaggtttatccgcctgaaatgctggatgaagagcttcctgagggtcagaaggatgtagaggacgtgtttaagcttcttgactgggagaagaatgtggatcctcattacagaaagcattatttccgcagaccggttgtggaaacagagacagagcagtatgttcagaagtggataacctatgcgaatccatacattgcagcaaaggagctgactgttaatccgggacagacagttactatcagcgacggagcggcatatggatgtatttttgttcagggacatggaaaatttggtgtttatgatgcagaagcgcctacacttcttcacttcggacagcagagtacagatgaattttttgtttctgagcaggctgcagtgaaaggtgttactgttaccaataccagtcaggtagaacctcttgttgtattaaagcattttggaccgaattgtcctggtgtgcctcaggaagtaccggaaaaataagacctaagtaaaaactgttatatacagtgttgtttcagagacagcccggaatgccaggaaaagtaagtattccgggctgtgcttatagcaggaggaaaaatatgaagtatttagtaggaattgataacggaggaaccttttcaaaggcagccatttttgatgaagagggaaaccagatatcagttgccagtgttcccacagaaactctgacaccaaagccgggatacacagaaaaggatctgaatgaactgtggagggttaatgcgcaggcggttcgtcaggcagtagaaaaaagtggaattgatccttcggatattgcaggtgtttctttttccggcgcaggaaaagggctttatatggtcggctatgatggaaaaccgtcttacaacggtatcatgtccacggatacaagggcatggaaacaggtggaacaatggtatcgggatggagttaataaaaaagtttacgaaaaaacatttcaggaaattcttgcagttcagcctgtaagtcttctggcctggttcagagataatcagcctgaggttctggagcgtacgaaatatatttttgcagtaaaggattatatccggtatatgctgaccggggaagcctacagtgaatatacagattgttcaggcggaaatcttgtaaatatgatgacaaaacagcatgacagagaactgatgacgctgtacgggcttgaggattgctatgacaagcttccgcctctgaaatactcggcagagatctgcggacatgtgaccagagaagccagtgaaaaaacattgctaccggaaggaatgccagttgcagctggaatgtttgacgtaaatgcctgcggtattgcatcaggactttcagatgaagatcagatgtgtatgattgcaggaacatggagtattaatgaatttattggaaaaaaacctgtgacaaatggaacggttgatttaaattccatgttctgtatgccgggatattttctgattgaggaaagcagtcctacgtcagctggaaatatggagtggtttatccgtaacctgatgaattatgaaaaggaagaggcaaaagaagagggcagttccatttatgatcttacaaatgagtgggtggcctctatagagcctcaggataataatgtgatttttcttccatttcttaacgggtcaaatgaagatgcacttgcaaaaggtacctttgtaggtctgactgcttatcacaacaaaaagcatatgcttcgggcagtttatgaaggaatcgtattttcccatgtgacccatgtgaaaaagcttctgagaaacagagaaattccgaagagtatacggctttccggaggagctgccaattcagatgtatgggtgcagatttttgcagatgcacttcagattcccattgacgttgtgggagataaggagctgggcgctcagggagcagctatggcggcaggaatcgcagccggtatatataaggattatcaggaggcagtgagccgtacagtaaaaataacaaaaactatatatccaagaccagaatataaagaaatctatgagaaaaaatatgccgcatacagggctgtaatagatggtctttcaggagcatgggaatatttcaagaattgatcaggaggtaacgaatatgatgaaaatggcaattatgggggccggagctatagcaaataaaatggctgcaacaattacaaaaatggagaaagtagaagcatatgctattgcggccagagataaggaaagagcagagatctttgccggtcagtatggatttgcccgggcatatggatcttatgaggaaatgcttgaggatcctcaggtagatcttgtttatattgcaacaccccattctcatcattataaatgtgtaaaaatgtgtctggaagcaggcaaaaatgtactttgtgaaaaatcctttaccgtaaatgcagaacaggcaagggagttattttctgttgcccatgagaaaaagctttttctcacggaggctatctggacaagatatatgccgtcaagaaaaatgattaatgacattatcaatagcggtgtgattggagaagtaacgtctctttctgctaatctgggttatgaactcagtcaggtaaaaaggatctgggatccgaagctggcaggtggggctcttcttgatgtaggagtttatcttgtaaattttgccagaatggtatttggagagcgggatgcagaaattcatacatcggctgtttttaaaaacggtgtagatatgattgacaatatagatatgattttcccagacggaaagacagcgtctatgcagtgtaatgtccacggtgttcttaatcgtgcaggtgcgatttttggaacaaaaggatacatagagattacaaacatcaataatccggaaaaaataacagtatttaatgaccggtatcaggaaatcgcttcctattttcctcccgaacagattaccgggtatgagtatgaggtggaggcatgtgtacgtgcccttgaaaatggggcgctggaatgtgaagaaatgccccatgaagaaacggttcgcgtaatggagatcatggatggaatcagaaaggaatggggatatgagatccctgtacaggaataagggggcatatatatgaaagcatatacattaggattatatgaaaaagccatgcccaaaactcttacctggaaagaaaagctggaagctgctagagcggcaggatatgactttgtggagattagtattgatgaaactgatgaaaagcttgcgagacttgattggaggagagaagaaagacgggagctggttgatctgatgtatcagattggcattcctgttcgtactatgtgcctcagcggtcatagaaaatatcctattggaagcaatgttccagaaatctgtgccaggggtatggaaattatggaaaaggccattcagcttgctgatgatctgggaattcgtgttattcagcttgcaggctatgatgtttattatgaagagtctactccggaaactgtaaagcgatttggggaaaatctgaaaaagtgtgagcagatggcggccagatcagggattgttcttggttttgagaccatggaaacggaatttatgaatactgtagaaaaagccatgaagtatgtacagatgattgattctccatatttgggcgtttatccggatatgggaaatattacaaatgcagcaaaaaaatacggaacggatgttctgaaagacatccgtacaggaacgggacatctggatgcggttcatttgaaagagacagttccgggagtttttcgtgaagtgccttttgggacaggtcatgtagattttccggcagtgattcgcgaaacctggaaagcaggagttaggagatatgtgacagaattctggtataccggaaatcccggctggaaagaggatctggattttgcagtaggaatgatgcgtcccattcttgacgctcagatagcttgatattatctgttttttcagaaatatattggattgttgcagcaaaaagtatatactgtaatcaggtgttttttaggtgtaaaacttaaacaggaggagaaaataatgctggaaaaattaaaagaggaagtttataaggcaaatatggatctgccaaaatatgggctcgtaacatttacctggggaaatgtcagtggaattgacagagaaaagggattatttgtaattaagccaagtggtgtggattatgacaaactgacaccggaagatatggtagtggttgatcttcagggaaataaggtggaaggaaagtataatccatcttctgatacagctacgcatgtagttctttataatgcatttcccaatatcggtggaatcgtacatacacattcctcctgggctacaagctgggctcaggccggaagaggaattccctgctatggaaccactcatgcagattatatttatggagaggttccatgtgtgcgtaatcttacaaaagaggaaattgaggaggcctatgagaaaaatacaggcattttgattgccgactactttaaggacaaggactacgaggctgtaccggcagttctctgtaaaaatcatggtccttttacctggggtaaggatgctcatgaggcagtacacaatgcagtagttctggaggaagttgcaaaaatggcaagccgctgcgagcttattaacccacaggtaaaacctgcgcctcaggaacttcaggacaaacattattacagaaaacacggcgcaaacgcatattacggacagagtgacaaataaaatttttgtgcaggaggatgtataaaaagaaaaaatagattattttggcagtagtatgccggaggttaaaaaacaggcttctcagtttggaagtctgttttttataaccaaataagcgaaataggttttacccggctttatttgtctggaagtgtatatggaaagttgggagcttccggacactgtagaaaatctttcagacagttaatgataaattcgtggtcggcaatatggtataaattagaagcaatgatagttccaatcaccacgctgtttcccttgatacgaatgggaaagcctcccccgcacaaagcataatctgttgctgaaagtccatgattttccagagtatcataatcctgctcaaaggtcagtgcagacaaaagtgaactgcgttccatcatggataccgtattgaacttacgctccatccatttctggttaagaagattggttccgtctggacagtactgaaatgctatgcatccattattcatgcgtatggatatggcgatcgtgatgttttgattttgagcacaggaaaccataaatgttccaaattcataggcagtgctgtgattaaaatgcggaaactgaagaaggtcttcctgctttttcaaaatttcaatatttttgtccattacatattcctccttttaagtgggacaaatcaaagaaaaaggtttttctgaatatattatatagcaatttttccctgtcagcaagagaaaaactttctgtatgctgaactttagcatatctttccgggatatgtgtggtaatgtcaggaaaattactgaagattaccacatatcggggagcttgcatacatgaagatttacgattatcagggaaagaaaaatgtcagcggcgacatgattcgtcaactgcgagtaaagaaccgcatgtcccagaatgatctggcggcaagggttcaggtagagggagtgatgctggaacgggacagcatcagcagaatagaaagcggaacaagattcgttgcggattatgagttgtttgtatttgcaaaagttcttggagtggatgttgcatccttgctggaatttcaggagaagaagtagagactgccggaaacggcagttttttctgttatttaaagatattttatgatacaataacactcataaagctgctggtttgtatcagatgcgtaagaaagatattcagaagcatattttggaggattataatgatagaaataggaaagaaacagaagctccttgtagtaaaaaccgtagaatttggagtttatctggcagaaaataaggaggcggatgcgaaaagccgtgtacttcttccggtaaagcaggtacctcagggaacgaaagaaggcgactgcctggaagtatttatttataaagattcacaggaccgtctgattgccacaacaagggaacctgtgcttacagtaggtcagactgctgttctgaaggtgcgccaggtaacaagaatcggcgcttttcttgactggggactggagaaggatctgcttctcccttatcatgagcagactgtccgggtaagagaaggacaggaatgtctggtagccctttatgtggacaaaagcagccgtctgtgtgcaacaatgaaggtgtacccatatcttgagaaaaaatctccttataaagaaggagatcaggtaaggggacgtatctatcaggtaagtgataattttggtgtgtttgtggcagttgacgacagattttccgcattgatccctgcaagggaggctgcgggaaaatatcgtccgggaactgttatggatcttcgtgtttctgcagttaaggaagacggcaagctgaatgtgtccgatcgccagaaagcttatattcagatcaatgaggatgcggaaagcgtccttcagatcattgaagagtttgcaggtgtgctgccgtttgacgataaggcatcaccggaggtgataaaaagagaattcgggctcagcaaaaacgcttttaagagagcggtaggccatcttctgaaagaaggaaagattgagatcagagaccggaggatttatcagacaaagaaataaggagcagattatgaattttacacatcttcatgttcatacagaatacagtcttctggacggttccaataagatccaggaatatgtggcccgtgtaaaagagctggggatggacagtgcggctattacggatcatggcgttatgtatggagtgattgatttttacagggctgcaaaggcagcagggatcaatcccattctgggctgcgaggtttatgtggcgccggggtcccggttcgacagagaagcaggaagcggtgaggaccgttattatcatctggtgcttcttgcagaaaataatcagggctacagcaatctgatgaagattgtttccaaaggctttgtagaaggcttttattataaacccagggtagatattgaggttttggaaaagtaccatgagggaattattgctctcagcgcctgcctggcaggcgaggtggccaaatatcttacaagaggaatgtacgaggatgcaaaagctgccgcgcttcggtatcaggatatttttggaaagggaaatttctttctggaaatgcaggatcatgggattcctcagcagcagactgtaaatcagcagcttcttaaaatgcacaaagaaacagggatcgatctggtagtgacaaatgacgtgcattacactctggcggaggatgcccagcctcatgatgttctgctgtgtcttcagacaggaaagaagctggcagatgaaaaccgtatgagatatgaaggaggacagtattatgtgaaatctcctcaggagatggaaatgctgttcccttatgccacagaggcgctggaaaatactcataagattgcagaaagatgtcatgtggaaatcgaatttggggtgacaaaacttcccaagtatgacgtgccggaaggctatacttcctgggaatacctgaacaagctctgttttgagggacttgaggaacgctatcagcctgttacccgggaacttcgggaacgccttgactatgagctttctactattaaaaacatgggttatgtggattatttccttattgtatgggattttatcaaatatgcccgtgacaatgacattatggtagggccggggcggggctctgcggcaggaagtcttgtggcctatactctgggaattacccagcttgaccccatccgttatgaccttctttttgagagatttctgaatccggaacgagtttccatgcctgatattgacgtggacttctgctttgagagaaggcaggaggtcattgattatgttgttcggaaatatggaaaagaccgggtggttcagattgtaacctttggaacactggctgccagaggtgtgatccgtgacgttggcagggtgcttgatttgccttatgctcaggtagacgccattgccaaaatgattccacaggaattgaatattacaatagacaaggctcttcagatgaatcctgagcttcgcaaagcttatgaagagcaggaggatatccacgggatgatcgatacggcaaaacgtctggaggggcttccaaggcatacgtccatgcatgcggcaggtgtggtgatcagccagaaggatgtggatgagtacgtacctttatccagagcgcaggacggctctattaccacacagtttactatgactacactggaagaactgggacttctgaaaatggattttctggggcttcgtacgctgactgtcattcagaatgctgttcatcagatcgagaggacaactggaaaacttctggatatgcagcagatcgattacaatgataaaaaggttctggattctctggggacaggaagatcagacggtgtgtttcagctggaaagtgcgggaatgaaaaacttcatgaaggagctgaagccgcaaagccttgaagacgtgatcgccggtatttccctttaccggccggggccgatggattttattcctcagtatatccggggcaaaaaccgaccggataccatcagctatgactgcccccagctggaacccattctgaaacctacttacggttgtattgtgtatcaggagcaggttatgcagatcgtccggaatctggctggttacactctgggacgaagcgatcttgtgcgccgcgccatgtcaaagaaaaaggcttctgttatggaaaaagaacggcagaattttgtgtacggaaatccggaggaaggagttccgggctgtattgccaatgggattccggaaaacgtagccaataagatttatgatgacatgatcgattttgcaaaatatgcgtttaataaatctcatgcggcagcttatgctgtggtttcctatcagactgcttatctgaagtattattatccggtagaatttatggcggcgcttatgacgtctgtaatagaaatgcccaataaggtttctgagtatattcaggtatgccgccagatgaatatcaggattcttcctcctgatgtaaacagaggtatctatggattttccgtggataatggagcaatccgttatggactatctgccatcaaaagcgtgggacggcctgtgatcgaggctcttgtggaggaacgtgaaaacagaggcccgtatctgtcgctgaaggattttattcagaggctgacaggagttgtgaataaaagggctatagagaattttatcaaagcaggagcagttgactgtctggaaggcaaccgaagacagaaaatgaccgtttacgcacagatcgtggacagtattgcccaggacaaaaagaataccgttgccggacagatgagcctttttgactttgcggaagaggatgtaaaaaaagattttgagatccgtatgcctgatgtgggagaatatgataaggataccctgctttcctatgaaaaggaggttcttggtatttacctcagcggacatcctctggagcgttacagcagtatgatggaaaaaatgatctctgcaaaaacaacagatttccaggcggatgaagaaggcgggattcccaaaatcacagacggtcagaaagtgatcgtaggcggaatgatcgcggataaaacaatcaaatatacaaaaactaacaaggtcatggcgttttttaccctggaagatctggtgggaacagtagaagttgttgttttccccagagattatgaaaaatggcagaaatatctgaatgaggatgcaagagtctttgttcagggacatgtggacgcaggtgatgacagggcgtccaagctgattctggaaaaagtacgttcctttgacgaaatgccaaaagaagtatggatccagtttaaggacagggatgattatggaaaaaatgaggaagagcttctgagaaatctgcgttcggtgccgggaaacagcagtgttgtgatctatctgaaggatgtcaatgccatgaagaggcttccggcaggatatcacgtgcagatcacggattcctggacagaagagatgaaggcaaaatatggcagctccaatgttaaagttgtggaaagagtattgaaaaacttctgaaaatgtggaaaatccaatatttttgatatgctgtgatactagaatgataccagaacattccctgaaaataaggttgactttttgctcagaatagcatatgctaacagtagctaagaaatgagataatcaagcatgagcaaaaaacgaaaaccccggaagtctcgaccacttccggggttttctgttccatttatgtaaggcggcttagacctttaggctgttactgccttttgtttctgtccagccatttgcagatatagtagctggctatacctgctgtgacagaaacaagaaatgagataatgatttcaaacatgaacagcacctccttcctgctggaggttcggcagcaataaaattatatcacagcacacatgagaatgatacgcaaaactttaaggtctgttggcttgtacagttggaagtatattaccttattttttgttttggatcaaaataatcagcattgcaaaaacataatgtttaaggcgaaaaattcatacttacttttggaaagagtattgaaaaacttctgaaaatgctataaactataaaccgaatatgtgtaaaacagatggggttttttgcgccgaaagcagaaaatccggaagatggaggaatgaaatcatggcagaaaaaacgataaaaaccatcggtgtactgaccagtggaggagatgcgccgggaatgaatgctgcgatccgtgctgttgtaagaagaggactgagcagcggattaaatgtaaagggtatttataaaggatataatggtctgttaaatgaagaaattgtagatatgtctgccaaagatgtgtctgatacaattgagcgcggcggtacaatcctgtatactgcacgctgttcagaattccgtacagcagagggacagcagcgcggcgctgagatctgcagaaagcatggaatcgatggtcttgttgttatcggtggagatggttcttttgcaggcgctcagaaacttgcgaatcttggaatcaacacaatcggtgtaccgggaaccattgacctggatattgcatgtaccgaatacacaattggctttgatacagctgtaaatacagcaatggaagctattgacaaggtgcgtgatacttctacctctcatgagagatgcagtatcattgaggttatgggacgtaacgcaggctaccttgcaatgtggtgcggtattgccaatggcgcagaggacgttctgattccggaaaaatatgattatgatgagcagaaactgatcaataatattattgccagccgtaaggcaggtaagaaacatcacattattatcaatgcagagggtatcggtcattctgaagctatggcaaaacgtattgaagcagctacaggaatcgagacacgggcaactatcctgggtcacatgcagagaggcggaagccctacatgtaaggaccgtgtatatgcgtctatgctgggtgcgcttgcagtcgatcttcttgttgcgggcaaaaactgccgtgttgtaggctatcgtcacggagagtttgttgattttgatatcaatgaagctcttgcaatgaaaaaagatgtttctccatatatgtgggaaatctgcaattcactttctcataactatgataaacatgcaaaaaaataaataaattatgatacaacggaggctaccgtcaggcggcctctattgtgtataaaaaggagagttccatgatcaccagtttacagaataatcaggtaaaaaatatcattaaactgaatcagaaggcgaaggcaagacgggaacagggactttttattgcagaaggcagaaagatgtttctggaggcgcctcttcactggattgaaaaggtttatgtgtcagagactgtggaaaaacaggacactgaggtgatggaaaaagcttcccggacagaatgggaggcggtaacagattctgttttcagacagatgagtgatacacagacacctcagggagttatgactgttcttcgtaagccgtcttatgagcctgaagatattctgaaagggaagaaacctctgatcatggttctggaggatctgcaggatccgggaaatgcgggaaccattttccgtacagcggagggcgctggcgtggatggtatttttcttacaaaaacctgtgtggatattacaaatcccaaagtgatccgtgctacaatgggatcagtatacagaatgccctttgtgtatgtggaagatgtggtatccctgaaagagatgctccgggacaggaaaattcggttttttgccgctcatttgcagggtaaaaatgcctatcatgaggaagactatacagggggaactgcttttctcataggaaatgagggaaagggactgacagaagaagcggcagaagcggcagactgtctgatacggattcccatgtgtggtcaggtggaatctctgaatgcagctatggctgccgggatactgatgtatgaggcggcaagacagcggagaggttaaacatacctcttgaaatgctttatggaagggaggaatttcatggagtttgttatggaaccattcatgtggcttggaattgtggcgctttttctggttattgaagcagttactgtgggactgacaaccatctggtttgcaggtggcgctttagttgcagcagttgcctcaggtctgggggccagtcaggcagttcagtggatcctgttttttgccgtgtcggtgatacttctgatttttaccagacctctggcggtacggtatatgaacagaggtgtagagcggactaatgtaaacagactgatcggagaaaaggctgttgttatccagaaaatcagtaacctggaccagaccggacaggtgaaggtgggagatgtagaatggatggcaagaacagaatctgatgaaatgaagattccggaaaaggcagtggtggtgatcaaagaggtacagggtgtgaaacttattgtagaggaagtaaaggagggttagttatgtcatttcttgtttttattgttattgtaggaatcattgcgctgctggttgcggcatcctgcattaagatcgttccccaggcatatgctattgttctggaacgtcttggcgcatataaaacaacatggaatacgggtatccattttaaaatgccttttatcgagcgtgtggcccgtaaggttaatttaaaggagcaggtagtggattttccgccgcagcctgtaatcaccaaagataatgtaacaatgcagattgacacggttgtgtttttccagatcacagatccgaagctttttgcctacggtgtggaaaatccgatcatggctatcgaaaatctttctgcaacaacactccgtaatattatcggcgatatggaactggatgagacactgacttcccgtgaagtgatcaataccagaatgcgggcgtctcttgatgtggctacagacccatggggtattaaggtcaaccgagtagaactgaaaaacatcattcctcccgcagcaatccaggatgcaatggaaaaacagatgaaggcagagcgtgaacgccgtgaagcgatccttattgcagagggcgaaaagagatctacgatccttgtggcggaaggtaaaaaacagtctgcgatccttgacgcagaggcagagaagcaggcggctatccttcgcgccgaggcacagaaggagcgtatgattcgtgaagctgaaggtcaggctgaggcagttcttaaagttcagaatgccaatgcagaaggtatccgaatgatccgtgaagcaggagccgatcaggcagttcttactctgaaaagtctggaagcgtttacaaaggctgcagacggcagagcaacaaagatcattattccttccgaaatccagggactggcaggtcttgccacatctctgaaggaatttgttacagatgataaaaaagagcttctggagaaaatagttccggatcaggaatgatctgaagtttttacaggagtaatcagataaaagaggagaggttattatgaatttaaagggacggaatttcctgacactgaaggattttacaccggatgagatccgctatcttattgatctggcagcagatctgaaagcaaagaaaaaggccggagagcttcatgagtattacaaaggaaaaaatattgcgcttatttttgaaaaaacaagtacaagaaccagatgtgcttttgaagtagctgctcatgatcttggtatgggaagcacgtatctggatccttcaggatcccagatcggcaaaaaagaaagtattgcagacacagccagagttcttggcagaatgtacgatggaattgagtacagaggctttggacaggaaattgttgaggagcttgccgctcatgcgggagtaccggtatggaacggtctgaccaatgagtatcacccgacacagatgctgtctgatatgcttactatccgcgagcactttggggaactgaaaggaatccgtcttgtatacatgggagatgcccgttataatatgggaaattctcttatgatcgcctgcgcgaagctgggaatgcactttgttgcctgcaccactgaaaaatatttcccaaataaggagcttgtagagctttgccgcacctatgctgcagagtcaggcggaagtattacccttacagaaaatgtagaagagggaaccagaaatgcagatgtaatttatacagatgtatgggtatccatgggagagcctgatgaggtatgggaagagcgcattcgtgatctgactccttataaggtgacaaaggaagttatgaaaaatgccggagagaaggcaattttccttcactgtcttcctgcttttcatgatcttaaaacaaagatcggaaaggaaatgggcgaacgctttaatctgacagacatggaggtaactgacgaggtgtttgaatcctcacagtctcttgtatttgacgaggcagagaaccgtatgcatacgattaaagctgtaatggttgcaactctgggagagccggagaacagataatgtatgatcaggaaacaattttaaaagaaatcaggacaaaatgggcgggcaaaaccgtccattttgcaaaagaaacagattctaccaatgaatgggcaaaaagactgtctcaggaaggcgcgcctcatggaacgctggctgtggcagaatttcagagcgcgggcaaaggccgtctgggaagacgctggcaggcgccggaaggaagttctgttatgatgtctcttcttctgaagcctgagtttgaacccgggtacgcctcaatgctgactgtagttatggggctgagcgtagctcaggcaatgcagaaaaccggaatagaggtttcgattaagtggcctaatgatgtggtaatgtcccgaagaaaaatctgtggaattcttacagaaatgggattgaacggggctaagatacgggaagttgttattggtgtggggattaacgtgaatttaaaagaaataccgtctgagcttcaggacaaagcgacttctctttatctggaaaccggaaagacatatgaccggattcagattctggctcaggtgctggaatgttttgaagaaaattatgagacgtttatccggacctgcagcctttccggaatggtggaagaatataataagcttctggcaaacaggaatcagcctgtccgtattcttgatccgaatcagccctgggagggaacggccctgggaattaatgaacagggagagcttctggtaaaggacgaacagggtacaatacagaccgtccgtgccggcgaggtgtcggtaagaggtttgtacagctatgtgtaatgttgttttcagatgcgtacagaagagacatattctgtaaatggtacagggataagtcattactgctcacacggtactattccgtcaggtgttttggcatgtattgccaaaatccccagacatacagggcaaaatgtcaccatcgagagtgagttggaatgtattttgaccaggttactgtgaacgctaacgaaataagagaaacatcaggaggaatattcaggaatgtatcaggataaaattgtgctctgcggcgctagcgcttatgagcagaagtattattttaatcaggatttcagttctctgccggatgcggtaaaacaggaactgcagatcatgtgtgttctttatacagaggatatcggaggaattctgacactggagtttgatgaagagggaaatcttcagtttaagacagaggcgcttgatgcagatgccatgtatgatgaaatcggaagcgttttaaagatcaagcagcttcagagcgaaaaaagagagcttctggaatctctggaaatgtattaccgcgtatttttccttggggaagcgccggaggatgagaaaacagaagataaatccgaagattcagagggaaaagctgtggattctgtggaaaacggagactgatttatggatatgatgtggaaaatcggtcaggttgaaatagaaaatccttttgtgctggcacccatggcaggggtaacggatcttccgtttcgcagactttgcaaggaacagggggcaggtcttctctgtacagaaatggtcagtgcaaaagcaatttcttttcataataaaaatacagcggctcttatggagatcgacccttcagagcatcctgtgtctcttcagctttttggcagtgaaccggagctgatggctgaggtggcaaaaagtattgaagatcagccttttgatattctggacattaatatgggctgtccggttccgaaggttgtaaataatggagagggttctgctcttttgaaaaatccggaactgatcagaaaaatcgtgactgctgtttccggcgcggttaaaaagcctgtaacagcaaaaatgagaatcgggtttgaaggatttcctgtagatccggtagaaattgcaaagatcgtggaagattccggtgcagccgccattgcagtccacggaagaacaagacagcagtattattccggacatgcagactgggatacaatacgcagaatcaaggaagcagtttcggttccggtaattggaaacggagatgtggattcctcggaaaaagcagaagctttgctgaaagaaaccggatgcgacgctgtgatgatcgggcgggcagttcgcggaaatccctggattttcagagaaatgaaccattatttttctacaggggaaaagctcgggcggccatccgctgaggaaatccgggaagtgatactgcgtcacgcacgctggcagatcgagaaaaaaggagagtttacaggaatccgggaaatgagaaagcatgtggcctggtatacggctggcatgagacacagcgccgggctcagaagagagtcaaatcttatttccagctatcaggagctggaagtgcttctggaccgcatgacagaacagaatctgggaaataatctgcaataaaaaacgccggatttttgcctgaaacaggggagaatcgggcgcttttccgcttgacaacagagatatatttgggtataatactgaaattgtgaatatcctagaataagactgccttttgggcggtattacgtatctgggagctgatgtctaatagtctacggatattgaaagggagtaaggtaatatggaagaaaagaaaaacttactaacctatgcaggacttaaaaagttagaggaagagctgcatgatttaaaggtagtaaaaagaaaagaagtagctgaaaaaatcaaagaagccagagagcagggcgatctttcggaaaatgcagagtatgatgcagcgaaagatgaacagagagacatcgaagcacgtattgaagaaattgaaaaaatactgaagaatgcagaagtcgttgttgaggacgaggtggatctggaccgtatcagcgtaggctgtaaggtaaaagtccatgactatgactttgaagaagatatggaattaaaaatcgtaggttccacagaggcaaacagcctggaaggcaaaatctccaatgagtctccggtaggaaaagcgctgatcggcgctcatacaggggatattgtggaagttgaaatgcctgcgggaatcatgaagtacaaagttctggaaatccaacgcaacgtgtagcgaggaaggaaagaaagcacgaacgaagtgagtattttctttcacccgagcgtacatcgacgaaataggaagtccgcaaggacgttttcctgcgaagcagggaaatttcggagatgagaggaaggaagaaaagcacgaaggaagcaaacgcagaatatttacaaaaacaaggaggcacggaagtggcagagcagaagaagcagcaggaacaggatctgaaccagttgctgaaggtacgccgggaaaaactggcagatctgcaggcaaacgggaaagatcccttcaaaatcgtaaaatatgatgtgacacatcatagccaggaaattaaagatcattttgatgagcttgaaagtcagacagttacaatagcgggccgtatgatgtccaaacgtgtaatgggaaaagcttctttttgtcatgtacaggatctggagggaagcatccagtcttatgtggcaagagacagcctgggagaagaagcttataaagatttcaaaaaacttgacgtaggtgatgtgatcggcatcagaggagaggttttccgcacaaaaacaggcgagatctctattcatgctgcagaggttactcttctgtccaagagcctccagattcttccggagaaattccacggtctgacaaacacagatcttcgttatcgtcagagatatgtggatcttatcatgaatccggaagtaaaggatacatttatcaaacgttccaaaatcttaagcgctatccgtacttatctggcaggcgaaggatttatggaagtggaaactcctatgcttgtttccaatgcaggcggagccgctgcaagaccttttgaaacacatttcaatgcacttgacgaggatctgaagcttcgtatttctctggagctttatctgaaacgccttattgtaggcggacttgaaaaagtatatgagatcggacgtgtattccgtaatgagggtcttgatacccgtcacaatccggagtttacactgatggagctttatcaggcatatacagattatcacggcatgatggatctgacagaaaatctttaccgttatgttgcccaggcagttctgggaacaacaaagatttcctataacggaattgagatggatctgggcaagccgtttgaaagaattaccatgcttgatgctgttaaaaagtattcaggtgttgatttcaatgagatccataccctggaagaagcaagagcagcagcggacgagcatcatgtacagtatgaggagcgccataagaagggcgatatcctgaatctcttctttgaggagtttgtagaggatcatctgatccagcctacctttgttatggatcatccggtggagatttctccgcttacaaagaaaaaaccggaaaatccggattatgtagagcgttttgagttctttatgaatggatgggaaatggcaaatgcatattccgagctgaacgatcctattgaccagcgcgagcgttttaaagctcaggaagagcttctggcacagggtgatgaggaagcaaactctacagatgaagactttatgcatgctctggagcttggtatgcctcctacaggcggaatcggcttcggtatcgaccgtatgtgcatgcttcttactgacagccaggcgatcagagacgtgctgcttttcccaaccatgaaaacgatcggcggtgcagagtccaaaaaagctgcgaagcctgcagcagaaaaagctccggaggctgtaaaagaggcaattgatttctcaaaggttcagattgagccattgtttgaggaagcagttgattttgagactttcagcaagtctgatttcagagctgtaaaggtaaaagcatgtgaagctgttaagaaatccaagaagctgttacagttcactctggatgacggaacaggcacagatcgtacgattttaagcggtattcacgcttattacgagccggaagaactggtaggcaagacactgatcgctatcacaaatctgcctccaagagctatgatgggaattgaatcctgtggtatgctgttatctgcaatccatgaggaagagggagaagaaaaacttcatcttctgatggtggatgaccatattccggcaggagcgaagctctactaaggataagaaatgaccttcagatctgacagcaaaaattcattttgacaacaattttcgaaataaccacgaagtatcatgaagcgtggtgaagagttgttatctgcgaactatatcgggaaaccgatgatttgagcactttttgaaagaaaaaatttcaaagagtgctcttttttgttagggcaaggccctgttttacattgtggagcttttggctgctccgaaaaacgaaactttgaaaaacaaataaaccacctgctgtgtgggcaatgtcgtcagtgttacttacaagcggaagttaaatgacgatgacatcaatgtggtacagggagactctggtcattttcctgatgcgccctaacggttaatggcagccaagatggagaccattaaagatgagtctcttcggaggcctgcttttatacccttaggtaaaaatataaacatgggtatcatatgttgtgcatagataatagagatgccgcgcttgaatcagaaaaaatagcctttgatcccaaagttcttaatgataactttaaagctattaatgacacctttgggcatcagtatggaaatgaggtactggttgaaatggccggtattttttccaatcagttccgcagtggtgacattgtaggcagatttggcggggacgaatttctggctttccttcccaatacaagaggatttgagagaatggagtatgtatttcaacgtcttgtaaaggaatgtgacagaaattatgaaaaagacggagtagtgatcaatgtttctgcttcttttggaattgcagtagctccggatcatggtgtgacttatgaagagctgtcacagaaagcagatgaaatgctgcttgctgtaaagcgggagaataagaaagggtatcggctgtatcagcaaatatctgcagataaggagttataaaaaagaaacccgagaatgctttacagattttctgtaaagcattttcgggttttcttttatggagggttcaatatgtaccggaattaataagctctgtatactgttttactgaatgtgtttaatctccatatcttttgggagaattaagtttaatataattgccattacaaatacaacagcaactacatttgcggaaaatacagactgaagtatttccgggaaaatatgccagataccgatttcgcttgctgtggtaaatccaatacctatggaaagagaaagagcagcgatggtaatattcctctgggtaaaacctgcttttgctatcatctggattccggaagtcaggatggttccaaacatcataatagtacatccgccgagaacagaatccggaagggaagcaaaaaagtttcctacaggaggaagcagtccggccaggatcatgcaaacggcaccggtcatgatggtgaaacggtttacgacctttgtcatgttgataagtcctacattctgagagaaggacgtaaccggcgggcatcccagacaggaagaaaatgcagaggcataaccgtcgcaggcaagggagcctgaaatttcttctgttgtaatatcacggtccagaccgccggaaaccattgctgtagtatcgccgattgtctctgctgcggaaacaaggaaaatgattgcaacagagaaaatagctccgggattgaattcaggcgcgtatggcatgattttcgggaaggaaatgattcctccggaaaagataacagagagatctacttttcccataaaaacagccacgatatagcctacgatcaggcctgctaaaacggaaagctgtttccagtatccttttgcttttatattccagatcaggcagaccagaagcgtaatggttccgagaataagattctgggcagaaccaaagtcgtctgagtatcctccgccgaaagatcttgtaccaacagtaaaaagagagaatccgatggcagttacaacggatgcggcaacaattggagaaataatttttttccagtattttgccagtaatcccagcgtaccttccataataccgccgatcatgactgcgcccacaactgcaggatatccgtaattggcggcaactgtactgagtactgttacaaaggtgaaactgactcccattacaataggaaggcgggatccaattttccagactgggtaaagctggatcagtgttgcaattcctgcaacaaacatggcattttggagaagaatggcaatttcagcctgtttaagacctcctgcaccggcaataatagtgatcggcgtaagattggcaacgaacattgccagaatatgctgaagaccaaaagggattgctttcatgataggaacctgcccatccagacgataaatgttggaaatgtctgcatttttggtgttcttcataacagagtgcctcctttttaaatgattttgtacactttttttgttcctccataaaattaattattattgcgatacaactaatttaattttaacataaaaaaatgatttgtccacaaaaaaattggtgataccttacaaaaagtgtttgcgaggtgcgtcgcatggctgacatgatttccaggcatttgtagcagacagatgtgttgtttttcctggtaaaaggcagtatacattaatatgtaaagagatttaaataaaaatttggtgtgaagctgcaactggattttcagattttacagaatttttataacttacgaaactgccgtagacaggcagagtgttccgcggtatattattaacagaattacgaatacgtatttctgaaaaacaacacaacgtacgtatattgtgcaaaattctgtattgcctcatttatagttttatgccaaggggattcgcatgctgcgaagccatatgaaaaataagtatatactgtacagttttgtgggaaaattttacagacaggaaaaatgcaggaataatgaatggaagttaaaaagaacatggaagcagagataacaattccgtttcaggaggaatacgaaaaactgaagcttctgatctcccagggtgtatttgaacttgttttgccggaaacagacaagggagatattcgtcttgtctatctgatgaatgatgctgtggaaagctttctgattttccggcaggcaaagctgacaggtacttacgagcctgattttgagggggagttaagagcagatcttgagaaaaggggaaatcagtatatcctgatcgtccatcaggaaaattctgtatttactgtttttttcagagatttggatctggaaactcatctttttaattatgggaaaacaggccatttctgggtaaaggagtatgaatatctgagacagctggaatatcgtattgctattttaagggataaaagagaatatcttggaaaagaattttgcacggaggaagaagaaaagctttcttatctggcagaatttcctccattaaatttttgctgttatcctgcggtgtcagaaaagtatattgtgccttcttaccctaagtggaaagtatctgaaaaagcgcttaatgaaatgatgaaactggcgcaggaagcaggggaccacagtcttatcagatggctgaaggtgtattcttatgttccgggaagggtgatcgcaaggaaaattgcctgtatgctgcacaggacaaagcatacagagcttgtagatcttatagacagaaaactggcccaggcggcggccgtatatcaggaccggcagtttgtgacagaaaaaaaggagcaacacagcttttccacagatggaaaagagggtggcttacaggaagaggaagctacagaacagacaaagatccgaaatatacaggaaagggcggaagcaagaaaacgagaactggagtgttccggcaaaaaggtggaaatgctgaaagaagagccttttttgtatgcaaaggattctgtagaatataaggtgcatctgatgatctggaaaacagaaggcagaaaccgcaaggtggatgtggaaaccattaattaactaaaaagaaacggaaaggaataacggaatgggaaaattaatcaatctaaatggagatgctgataaaaacaaaacacttcagaaaattctggagcagctggatactttaaaagatgagctggcagagctgctgtctgcatctgaggatacggatacagacagcgccggaatggatgcccttacagaggctctggacgccctggaagacgctgcagaactgattgatgaggttctggactgatgactcagagttatttataagccggaagttctttcagaataacggcatattttctgaaaagctgctgtctttatgctggagaaatgtaggatcatgtataatcacaaaattggaaagcggaatctgtgccgggattccgttttttatttcccggttttattgctgatttaagaggaaaacagtttttatttgtgtttgtagtaaaaaacagcaacctgagtacggtctctcagctgtaatttatccagaatagagctgagataattacgaacggttccttcgcttaaaaaaagctgtgaggcgatttccttattgctgagcccgtctgcaataagacggataatttcaagctcccggcggctgatatcataatcttcataatggaaggaagaaccggaatgaataagctccggaattctggacatgatttctgtgccaaaaacggtctgaccggaacagactgcctcaagagcaggcaggatacttgcataatcctgtttcagcagatagccttttgccccaagcttcagggcctttacaatatactcgtcatcagaaaaggtagtaagaagaaggattttcgcatcaggaaattcttccagtatctcagcggacgcatcaagtccgcttttttctttcattcgaatatccataagaagtacatccggctgatggattttgtacaattctgcagcttcttttccgtctgtaccggaagcagccacagtaacttttccactggcttccagaatggttgtcagtgcgccggaaacaaaaatatcatcatcgacaattacaattttcatagtttaggtctcctgttcttttggaatggtaataaaaatacggaagccatggtccgtggtgatctgaacagttccatgtaaaggggcaagtctgtcatggatattggaaagccccattcctctgttttgagtggaaaagtcataccacccggtattttgcagatgcctgggatttccgaaaaaagaatctgatgttctattttcggaaaaactttgagagatacaggagcttcctggaattttaccattatcctctatacaaagctgatacagagcaggatgttcacgcatgacaatatatgcgctggtggcattgctgtgccgcgccatattggaaagagcttcttttacaatactgataaagcagtatttaacatcgcggggaatttcaagtcccatatcataatccagagaaacaggacaaaactgaaattcgctgatcagtccctctacagattctctgagattgacggactcatcatgaagatcgtggacacttgtccggatgctggtcattgcctgattaagagaaatatccagactgtccagaagaggagaaacagcctcagagctgctgactgcttttgcggctcctgtgatcagaatagaacgggacaggagatgacctacattgtcgtggatttctctggcaatccggtttcgttcttttaaagtggctgtgtatatttcataattctgcttttccacaagcatatgatttttttcttccagaagaagatttttttctgtgctgtcatcccggagcttcataaaatcctgtctgagcttttcttcggcttcggtgcggaactgaaggaaaaacgccacaataaaaaacaggatgccccagaaggaaaaacgaaaaatatctgagttcattgtctggatcacataaaggtaaagtaagcctcctgcaagggcaggaagataaaaatgatcctggatcagaatataaaatatagcaggaaaaaatgcagacatttcagggactgcaaccgctgcactcataaaagctgcacacagaagcagatgaagtttttttgattctgagaaatagcctgcgcagcaggttcccacactcagaaggaaagcgcagataaacgtttcatctggtttctgaaaaaacagaaaaaagaaacctgataagataagtaatcctgtattctcaagatggcgcatgacagttcctctcctgattattatttctgttaagaatccttatggatcctatgttccagatggtttcagtataatacaaaacaatcaccggggcaaagaaaacaaaggaagaaaagaagaaagtgacatttgtcatatgagaaaatgacggtattcactaccggaagaagctgtcagaggttataattttttcatgctcaggataagcagcaggtatggagcctgaaaataaacaaaagcttttatttacgtgtctttgcagggggacacatacagaggttcgcatattttggtgtatgtatatggcatatttgtctgcgaagaattttatatttgctcctttacagacaggaaacagaaaataaaaatttatcgggaggaaaaagatgagcggaacagattatgcaaaagaaggaattgtacatatagaaaatctggtaaaaagatacggttctctggtggctttggatcatctgaatctggatatccgggagggagaaatctttggtcttctgggaccaaacggttcgggaaaaacaacggccatcaactgcatacttgctcttttaaaatatgataagggaagcatccggatttttggtaaggagatggagcctgataattatgaggcaaaaaggcagattggtattgtacagcagaatgtggcagtatttgatgagtttactgtgtatgagaatattgactatttctgcggcctgtatataaacgacaggaaaaaaaggaaacagcttgtggaggaagcaattgcatttgtgggacttgaggattacaggaaaatacgcccaaagaagctttcaggagggcttctgagacgtctgaatattgcctgtggaatcgcacataaaccacggctgatcattcttgatgaacctactgtagctgtggatcctcagagcaggaaccggattctggaaggaatccagcagctgaacagacagggctccactattatttatacttctcattatatggaagaggtggagcagatctgtacaagaatagcaattatggatcatggaagaagtattgcatcaggaacaaaggaacagctgacaggaatgataaaaacaggggaaaaggtgacggtagaggctgttgtactgaaagaagagcagcttgtacagattcgggaactgtctcatgtatttaaggtagattatgaaaacgacattctcagggtgcagtgtacagaggcaaagcataatcttgtgaggatcctgcggtatctggaagatcaggagatcagttttggaagagtttactcagagcttcctactcttaatgatgtatttctggaaattacaggaaaagagcttcgggattaggaggaaaggtttatggttcagttaattaaatacagcattatccgtaaaataaagaactttaacattatattctggccctgtatttttccccttattatgggaactctgttttactttggatttggaaatatgtcagagtctgattttgagactgttcaggccggatatgtagaggaaggcgcgggcaatcctgttttttctcagtatcttgaggaaattgaaaaaggtggaattcttatccatgtggagactatgacagaaacggaggcaaagaaacagctgaaggaaagacagctggacgggatttttttcggagcagacacaccttatctgcaggttgcaaaaagcggaatggcgcaaagtgtgatgcagagtcttctggaaagctacctgaacggtaagaatacgctggaaaccgtggcagagatccatccggaaaatatggagcaggcagtggcagccatgtcggattataaggaaattgtggaaaatgtatctcttggaggaaaaagtacaaataataattctgtgtttttttatgctctggtaggtatggcctgcctttatggctgctttgtgggaatgggatcggctttctggcttcaggcaaatgtaacagatcttgcggcaaggcagtgtgtgtcacctgtacacagaatgactatgatccttacagaaatgctgacttcgttttttatccatttcctgaacgtagtgattctcctgctttatctgagatatgttcttcgtatggaatttcaggaaagtatggcgcagatgctcctgatttccctggttgggtgtattgtgggggtcagtatgggagtttttgtttccagtgcgtcaaagttaagcgaaaacatgaaagtggcgatcatgcttggcatttccatgacaggaagtactcttgcaggattaatgaattctaaaattaaatttgcagtagaccagaatatgccgattataaataaactgaatccggcagctctgatcacagatgcattttactgcattaatgtttatgatgatccggagagaatgaagacgaatcttattacgcttctgatcatggctgtggtactgacggccggttcatttttggtagtaaggagggttcgctatgacagtatttaaaggctatatgaaagtgatcagacagagcagatggctgatacttatgtatgtggcaatcttttttgcctgcacgcttctgatgcagtcagcggcaggaaagacggagaaaagctttcaggcagagtctttgaagataggaatcgcagatgaggacggaggaacgtttgctatggcgttgagaacatatctggataactttcatgaagtgataccgctggaaaatgacatttctgctatgcaggaaaaacttttttatcgtgatgtggagtatattataagaatcccggaaaatttttatcagaaatgtattgtgagtggagaaaagcttccggttacaactgtcccggatacctattccggcatttatgtggatcagcagatcaacagctttctgaacaatgcaagaacctgtcaggcagcaggatttacagagaaggaaatggcagatgctctcgtaaaggacataccggtgaaagtagagcttgacacgtcaatgggttccggagagacacctcagtatatttattattttcggtatgttccatacctggcgctggcccttctgggttttgtgataggaaatgtgcttcttgtttttcgtaaaaaaggcctgaagcacagaatgctggcatctccggtttcttccagacgccaggctttggagggaatcctatgtatgatcgtgaccggcacagcactgtttgtactgattattctggttgcgttgatctggtatggaaaagaactgtgtgcaaatggtaattggggatatcttgttatgaatacagcagctttgttttttgtagctgtttctattgcctatttctcaggaagtcttgtaacaaataaggatgcgctgacaggaaccatgaacattatttcgctgggaatgtgtttcctctgcggagtatttgttcctctggactatatttccacaggggtaaaaaatgtcagtcagtttcttcctgtatactggtatgagactgcaaatgaaattctgggagagtttaccgtactgaccggcagtgcaaaaatacagatataccaggcggttggtattcagcttgtgttcggagtggtgtttgtgtgcctgaccctggttgtggaaaaatacagaagtacagggaagtaaggtgatttagtcacaggaagatctgattaaagctaatataaaatcgcttgaaaaagcttacctagatgctataatagaaacaggtaaatatttgaaaaggatggtactcctgtgaagaagagtgagagatgccttgctattctggaaatactacagagacagcataaagtaacagttactgatttagcgcagcgatttggaatatcagaaatgacaataaggagagacttgaattttctggctcgtcaatataacatctccagaactcatggaggtgctgaattgggtaatcagcctgtagtaagaatgatttcatttgatgaagccagaattgctcataaagaaacaaaagaaaaaattgcagctatggcggcaacaatgatacgaagtggtcagaggatatttgtagatgcaggctcaactaccagaatcattcttaattatttgaatgaggaaacgaaggccgtggtagttgtaaatcatcttaaagttgcggaacaggcgttgcagttcgaaaatctgtcggtcattatgttgggaggcgatatgattcgaattacaaattgcagctcaggtccggtggcagaagaacagttaaaaaattatcagctggatattgcttttatcggagcagcagctattggtacagatggaaagttatatgatggatattcgccggaagcacggctaaagagttcccttttttcagttgccaaaaaggtttatgtacttgctgattcttctaagattaatacatatgatttgaatgaatttggaagtctgtctcaaatagatggattaataacagacgcagggatagatgaagaaggaatgattttaatgaagcgtcatcgcgtaaatgtgatgattgcagaataacagaataaatgtaaggctctgaggtctggtacagaaatatgttctgtatcagactttttttgttcaaacaaacaatttattctataaatttccatgaattaaaaacgaacattttgcgaactaaaaacgaacattatgtgcctggggaaagtgtgaaaaactatgaaaaatgagagggaaacagggaaaaataaattaaatacaaacaatataatagagaaaatcaaacacttaaaagatgaaatgcacaaaatataataagtataattggtaattaatcacattgaattaaaaaaaatgttatgataatatgttcatataaacaaaaaggaaacggccaattccaaaaacaaacaaaattataagacaaagggaggttttcagatatgaagaaaaagtttatggcagtgcttcttacaggagcaatggcagtatctatggtgtcaggtattacagtaaaagctgatgaaaaagagagttatacaattggattttcaccgtatacattgacaaatgaatattttacagctgttcttgatggagtacaaaaagcctgtgatgagacaggaaatgagttgatttattttgatcctcagaatgatccaacacagcaggcttctcagattgacgatatgattgccagtggaattgatgcattgatttatattccctacgattcagcaggagcgcagactgtacttcagacatgtaaggatgcaggagtaaaggttattaatattgataatgttattacagaagatgattatgagctggtagatggaatcattgcttcagataatacccagcttggctatttgtcaggtcagtgggtagcagaaaatcatccggatggagcaaatgtactggttgttcatttgcagactgcagaatcctgtattattaatgtagatggcttctggaaaggaataaaggataatacagaaaatgctgaggcatttaaagaagtacaggtagtagaaggagaaggttcaacagaaacttcgtttaatgtagtgtcagatgcacttcaggctcatgatgatattgatgttatttactgcattaatgacacttctgcactgggagcagtacaggcggtagaagatgccggaaaaacaggtcaaattgatattcttggaaaagatggagcgcctattggaaagcatgcagtcaaagatggaactatggttcagacatctgcacaaagacctacctatatgggatatcttggagtaaaagaagcaatagatcttctggaagggaaagaaattgaatttaatacagcgattgagtcctacagcattactgcagacaacattgatgattatgacctggacgcatgggattctctggaagagtaattgatatggaaacattcggctaaatacagctggattaaagcagggcgttgcgggtgtattgcaacgcccaatttttaaagaatttatgagaggaagcataaatatgagcgaaacaaagttgttggaaatgaatgatataaccaaagcattttcatccaatattgtgttgaacggtgtgaagctttctgtaaatgaaggagaggtcgttgctatcctcggtgaaaacggtgcaggaaaatcaactctgattaaaattttgggtggaatttataaagctgattcgggagaaatccgtatacatggagaggtaaagaatatatcttctgctgcagtagccggtgcaaatgggatcagaatcattcatcaggaaattgttcttgttccggatagaactattgctgccaatgtatttttggggagagaaccaagaaataagtttggattggtagatgtacctgagatggaaagacagacacaaaaactgattgatgatcttaacctgaacctcagggcagatcagttagtcagaagcctgacaatgggaatgcagcaattggttgaaatcataaaagcaatctcagcagaagctaaaattgtagtaatggatgagccaacatcttccttatcacagggagaggtggagattttgtttggaattattcagctgcttcagaaaaaaaacataggcatcatttatatttctcacagactggaagaattatttgcaattacagacagaatagtagtgcttcgtgacgggaaaatggtgggagatattaaaacaaaagaagcagaaaaagataatttgattaatctgatggtaggaagagaactggatagtttttatacaaaaaacaagcatcacattggggaaatagcattatcggtaaaaaatctttctcatgaaaaatatttcagtaatgcgagttttacagcacgatatggagaaattgtaggctttgccggactggtaggttcaggacgaacagaattaatgaaaacagtctttggagcttatgctaaaaagaatggagagatacagttagatgggaagtctcttgaaattaaaaatccgaaagatgcaatcagaaatggtattgcttatgtctcagaggatcgacgtggtgaagggcttatactgaaaaatgatgtgaaattcaatatgggtcttgtctgtttgaaggattttgtaaaaggaattcgtgtaaaaaataaagagtggaattcaatggtagaagagtacagaaaaaaattttctattaaaattacatcttcaaaacagcttacaggaaatttaagtggaggaaatcagcaaaaagtcgtattaagtaaatggctggcaaataatccaagagtgattattctggatgagcctacaaggggaattgatgttgcagcaaaggcagagatttatgcaattattgatgcgttggctgcaagtggcgtatgtattattatgatttcttcagaacttccggagattattaatatgtgcaacagatgttatgtgatgtgtgagggaaagattacaggagagatcagtgaaaatgaattttctcaggaaacgatgatgaagctggcaacacagagataatatttatttaacaaaaacagtagacaaaaaagaagcaggaggtctggaaatgcatacagagaaaaaaagaataccaggcatgtatttttttaaacgaaatataggaacaattattggcttaattcttttaatcatagttgttaccatatctacgccaagatttttgacaacttcgaatatattaaatctactaaaatctaattctgtaaatgcgattatcagctgtggaatgctgatggcaattcttatgggagagattgatatttctgttggatctacagtaggtctgtcaggcattattggggcttatatgatgacaaatatggggcttccggcaggaccaacaatttgtatctgccttatggtaggtgccctggtaggtattgtaaatggtattgcaatttcttatttaaaggtacctgcttttgtagcaactttagcaacacagagtattggacgtgggcttacggaaattatttcgggaggagttactattcgtgtaagagatgattcctatacagctattggtaacacttctataggaggaatttccgttattattatttatgctgcagtgattctggtatttacatggtttttattgaaccgtacacgtttcggatactatatttatgcgattggtggaaataaactggcagctcagtattccggagtgaatgtaaaaaaatataatatgcttccgtatgttcttattggtcttttctgtggcctcagtggattgatctggtcagcaagactgggaagtgcagctgcaactctgggaagtggatttgagatggatgctattgcagctgttgttattggcggaacaagtatgtcaggcggtgttggtactgttggaggaacttttattggagttttaattattggggtaatcacaaacggtctgaatcttatgggcatcaattctttctggcaggaagtatttaaaggcattattattcttgttgctgtcgttattgatgtagtaagaaaaacaaaaacgaaagagtgagaaaaatggcttttgcaggaattgatataggaaccagtggatgtaagctgctggtatatgatttggaaggacatgtgatttttcgatcatccagaaagtatcgggaagagggaagggatggatttagagaactgaatcctgaagtggttctggaaaatgtcaagattattttatcagaagccggaaaaaattgtccggaaaatatagaagctttggcagtagccagtcttggcgaatcagttgtatgtcttgatgagaataataatattctggccaattcgatgcttaccggagactgtaggggaatcacagaaattcaggaattgattcagcattttggagcacagcatatttttgaaataacagggcttccgccaaatgaattatatggtcttccgaaatatatgtggctgaatcagaatacagatgtgataaaaaaagcaaaagctattttatattatgaagattttattggatatatccttacaggaaaaagaatggtgagttattcctcggcggcaagaagtatggcttttgatatcagaaaaaaggagtggtcagaagaacttctgggggcagctggtatttatttacaacagatgtccgtacctgtggcaccgtctacagttattggaactgttttgccggagatagctgaaagactgggattaaatcatgagctaaaagtaatagcaggtgggcacgatcagacctgtgcggctctggggagtggattgatatcttcagaaaacggcgaaattggcatgggtacctgtgaatttatgtttacaatgctgccggaaataaaaatgactccttatatgatacaaaataattttacctgtattccgtatgtgttgaacaatacatatttatccagtattgaagtaactacctgtggaatactgaaaaactgggcaagagatactatttttcagggtatatctatggagtgccaaaaacagggtaaggatttttggggagaaatggaggataaggcaaaaaatatacatacagacatactgttattaccccaatttggctcggcaggaaatccggatctttccatggatgcaaaaggaacaattacaggattaacaattcatacaaaaccagaggaaatatacagagcgattcttgagggaatggcatttcagatgtatctggcgtatgaaagaatgaatgtaattggtacgaagatgaaaaagattgcagcaacaggaggcggatcagtttcagatctgacccttcagataagagcagatgtgtttggaatggaggtatattctctggaaagtgaagaggctggaacattggggtgtatgttgatgtcagcagttgctacaggagcctataagtctttgaaagcagggataaaaaagacagtaagaataaaaaaatgttttaaaccagattcggagatgcatcggtattataatgaaaaatttaaaaaatataaggaactatatgagttaatgcacagatttagataaaaatgtggaggttaaaacaatgaggctggtaaatggttttaaattaatggaatttgcaaaaaggtatcattatgtacttcccgcatttaatacgacaaatttagaaatgacgtatgctattgcggatgggctaatgaaagcagagcttccaggatatattcagatttcttcaaacaatttgagattgtcaaatccggagattattgccgaaatggcagcagatgcggtcaaaaagtcagagacacctattggtttgcatttggatcatgggaaatcttttgaggatgtaaaagcatgtatagatgcggggtttacatcaattatgattgatgcatcttaccttccttttgaagaaaatataaaggaatgcagaaaagcagcagactactgccatttttatggaattccagtagaagcagaactgggagcattgaagggaaaagaagaggatattataaatgaggcagaatgtaaaacagatcccgatatggtagcagattttgtggaacggacaggatgtgatactttagctgtgtctgtgggaaatgttcatgggttatgtttgaatcctcagattgatataccacttctggagaaaattaatcaggtgagtaaggtgccgctggttttacatggtggatctggaatacctaaagaagttatatgggaagctaaaaaatacggactgataaaaattaattacggctctgatcttcgtaaagaatatattaagacatttggaagtgcatatgaaagtaatcataatgaacatgatgtaatacatttaagcctggaggcagtggaagaggtaagcagacgggcacgggagctggtaacaatgattaatgaacactaaatttcttctgtaggtggtgttagtttgaaacatacatatttgggaatagacatgggaacatccgcgatgaaaatggtgcttattgactcggaaaaggctgttctcagacaggtttctgaggaatacgaagcagtgcatgcaggagacggatggagtgagattgatcccgtaatctggtattctgctatgaaaaaaggtatccataaaataatggaagggcaggatacaagtgctttggctggaattggggttaccggtcagatgcatacgctgattgttctgggagaagatgggaaagctgtccgtcctgcaatgatgtggaatgatacaagaacaaaaataattcttccagagttaaaaaataaaatcagaaagtttccagaaggggaatatttgtctaaaacaatttcaacaggaagtccggcagcaaatctttactggatgaaaaaatatgaaccggagaatttggaaaaaataaaaaagtttttgataggaccggattatttagtattttgccttaccggaaatacagtaacagactactgtgaagcatcaacctcatgtctttatagaattgataaaaaagaatggtcagaagaaataaggcaactaataggattagaaaaaaatacatatccggaaataaaaggaagcgcccgaaaagcagggaaaattttacctgaaatagctgaggaattccagttcagttcagatgtggaggtgattgtagggacaggagataatcctgcaacagctatttctacaggatgtctgggtcttggatatcctgttatttccctggggacatccgggatatttatgatgccaatagagaagcctgagagccagacaagagggaaaaagatattgttttcttttgatgataaaaaatattcttttctggttcagggagcagttcaatgtaatggaaatacatttgactggtggaatcgtgatattatggaaatgaggaattttcataaaatgacaacagaactggatgttagtaaaatggcagaaaatgaattaatgttttatcctcatttaaacggtgaaaaaacaatttatgcagatacagaactgagaggagcatttacaggaatcaatctttctactacccaggaagacctgttttatgcagttatagaaggtctgtgtatgggatttcgagaactggcagaaaaaatgaaattgcctatcagggaatatggaagtgtaaaagtagtaggtggaggagcgaaaagcccggtatggcttcaaacaatggcaaatgttcttaacgtttcagttgaaaaaatggaaggaatgataggacctgcttttggaattgctttgttagcatcttataaaaatgagaatttttcatcactacaaagaataacagaaggcaatgtaataacagaatgttgttatcgaccggacaggaaagctgcaagtttttgtgaaaaaaaatatgagaaatatctgagaatgcgaaaaggcctgaaatatattgaaaatggaagtaaggtgatttagtcacagactggccgagaatcttcgtgtatgatacatacataaacaggaggaaaaaggtacagaaataaatctgatacagaagtgtgatgtaaaagcagagcatgaaaataaatcctgtaaaaatggaaataataaataaaaatacacaatgtccgggatgcaggagacggaacgccgggcaggaggaggatcatatgtcagttttaaatattacaaaaaataattttcagaaagaggttatgaacagtgagaagccggttctgttggacttctgggcaggatggtgcggaccctgcaggatgctttcaccggtagtggatgagattgcggaagaaaatgacagtattaaggtatgcaaggtaaatgtggatgagcagcaggaactggcatctgagttccaggtaatgacaatcccaacactggtggttatcaaaaacggacagattcagaaccgttctatgggagtgaagccaaaagaagagatcctggacatggttcagtaaaacgaaataaaaagtacaaaacagggaatttccttcaggtcggacagtccggaaaaggagttccctgtttttgtattgaacatgttcattctgaaagttcttccagtccttttttgtccgtgatctcgatggttccacgggacagtctcaccagattttcactctgaaaatagcggagcatccgtgtgactacctcccgggcagttcccagatgattggctattttttcgtgagtgatctttaatatatcagtgttttccagaagagtttcttccacaagaaaggcggccagtcttttgtcaaagcttttccacataatctgttcgatcagccacattacctcggaaaagtgacttgccatgatctgattggagaagtttgccattggagcagattcttccatcagagatttgtatatatggggtggaagaaccagtatttcactgtctttttcggcttcaatgataacttcaaactggatgttctgcatcacgcaggatgcggaaaaaatacatacatcccgctcaaaaagacgataaagagtgatttctcttccctcatcagatacgatatatgaccgaagctgtccggaaaggatcagaagcattccaagacagcttacagagccgttgtgaaggacggtccctttagagacagaccgctgaaaagatgtctgggaaattgttttctgctgggcaggtgtcagtttatcccatatgggaaaatgtgtggagaaatccatatttatgcctccttttacgggcagccggtgtgaacgatactgccggcaacaatgattttaaggtttttctgttaaatgtaaaatttgttgtgagaagtactccggaacaagccccggtttcttacagtgaatggtgtaaacagtaatttaagtatatagaacggtttggaatctgtcaaatatctggaaaagtcaggaggcatgtgataaaatttaagtaatgtattttttaattataaatgaacaggttaaaaagagtacgaattttttatttattttttggcatatacaaaatatgacaagggatctacacaggtccggaagtatggcatgatgccgacaggcaggaatttatgataaagcagcaggcggtttacaggaaggagatttttatggaaagacatggatttgcaatgaaaataaaaaaagggcagatgaacgcatacaggaaaaagcttggcgaaatatggccggagctgaccggatttctggacagaaatgagatcagtaatttcagtatctggaatgcggaggatctgatttttggatattatgaaaaccaggataacagatgcaaaggagaaggggaaaaggcagaaattgcagttcttacagaaaaaatccaggatacgtttgactggatttccactccgggtcaggatatgcggctgatgtatcataattttggcattgtgagaaaaaacaaagaactgatccgccacagagtttttatgaccagactgaaagacggatgcgaagaagagtataaggcccgccatgacaggctggtcgcagagcggggagagactgcagatcccggtccggacagtaatttcagtatttggagcgccggaggatatattttcggctatgatgaaattgacactaccatggaaacagaggaaacgattgcttcaagagaagcaacggtttcctgggaaatgcgtcagcttgagattatggactggatcacaaatgatgtggactggatgacaggagaagtccatgcagatgtaaagcgtctggcgtggcataactgaacagagcggtgcggcttatggttcagcctgcggcagaaaattactgaggcaggataagacagcagtggaaggtttggagcacatatgaaagaaagtaagtatgtaactatatataaagaatggaaggaaaaaatcgaaagcggtcagattgcagaaggagaacggctgcctacagaaagcagtctgatggaaagctatcaggtttcccgggatactgtccgcaagtccctgaatttactggagcagaacggatatattcagagaggaagaggacgggcatcgctggtaatgccaaaacagaggtatacgttcccgctttctgaaattgcaagctttcaggaggtaaataagctgtcaaatgcccatgcggagacagaggtggtaaatcttgatattttgcaggattcccacaaaattaaaaaaatttttcagcagagtgtaaacggagaggtttatgaactgatccgggtaaggcgcatgaaagatgaggcagttattcttgataaggactattttgtaagggatgttgttcctcgtcttcctctgaatgaatgtaaggtgtccgtctaccgttatctggaggaagagcttgggcttcagatcagctatgcggtaaaggaaattacggtgcagaaggcaaatgcagaggattatgaattgttggacatgggggattataacatggtcgtggtggtaaaaagccacacatatctggaaaataatacgctgtttcagtgtacagaatcccgtcacaggccggataaattccgatttgtagatctggcaaagagaaaactgtaggagaattcagccgcagttccagattcctgccggcagagtttttgagaattatatatagtttatggaaataacaactgtcctgttttaaaaccggggcagttttattttttactgatcaggaaagcagtatattctgtacggatcttcccggaaaacgctccgtgaggagacggtcggatatatgcggaacaggacttcacatggcagtctgaatccggcagatacattttttgaaccggaaaatccaggataaataagaaagtcatttcctgtaattctggggagtttattggacaaagtacacaaaaacaaagtcaaaattttattcaaaaacacaacacaaaagtatttgacataaatgaacgtataaattaatatataaatataagttgtacgtataaatataataaagaaaaaagatatacgtataaggaggatggaaagatggcaggatttgcaaatgatgcaaaaaagatgctagagcttttgggcggcaaagaaaacattgtgtcatttactcattgtgcaacaagaatgagattcgtacttaaagatcagaaacaggcagatgtgaaggcgattgaggagctttcctgtgtaaaaggaagctttactcagggcggacagtttcagatcattatcggcaacaaggtttctactttttatgatgattttgtagaggcaagcggaattgaaggcgtaagtaaggcagaagtaaaaacagaggcaaaaggcaatctgaatcttcttcagcgccttctggcaaacctggcagaggtttttgcgccgattatcccggcaattatcgtaggtggtctgattcttggattccgtaacattatcggcgatattgcgcttctggaaaatggaacaaaaacaatcacagcagtgtatccgttctggaacggtgtgtataatttcctctggctgatcggtgaggcaatttttaccttccttccggtaattatcacttattctgtgtgcaaaaaaatgaattctgatccggttctcggaattgtccttggaattactctggtttctccgcagctgatgtcagccagtgactatgtgcaggcagtggctacaggcggggacatcaaaacatgggattttggcgctttccatatcaatatggtaggataccagtcacaggtaattccggcaatccttgttggaattctgttttctgtgctttataaattcctgaaaaagcatgtgccggaaatgatctccatgatcgtagtaccgttcttttcactggtgccggcggttcttctggcccatacagtgatcggacctttcggacgtgtgatcggcgacggactggcaaagatcattcaggtaggctttgattcttccttcagctggatcgtcagtggtatttacggccttctgtatccacttatggttattacaggacttcatcatgcaatgcttcctatcgaccttcaggctgcggaaactgtaggcggaatctataccttcccggttgttgctctcaataatattgcccaggcttctgcagtagtggcttttgtaatcatcaacagaagaaatgcaaaggcaaaagaggttggtgttccggcgtttatttccggatatctgggagttacagagccggcaatgttcggtattaacctgaaatatctgtatccgtttgtgggagccatgcttgcaacaggagttacaggaatgatttccagattgatcggagtaattgcaaacagtgtaggtgtcggcggacttcctgcattcctttccatgaaagcccagtatatgcttccatatattggagttatggcgctttgtattgtattatcaattctgtttacgctgcttttatcaaaaacatcactgaacagtgaaaacagaaagaaaaactaaaggagaaaaactatggtggaattaggcggaaaagtagtatatcagatttatcccaagtcttttcaggatacagacggagacggtttcggagatctgagaggcgtaattgagcatctggattatctggcagagctgggtgtggactatctgtggatcactccgttttttacctctcctcagtatgacaacggatacgatatcgcggattacagaaatattgaccccagatacggaactatggaggactttgacgagctggtacgggaggctgccaagcgcggcatgtacctgatgatggatatggttctgaaccatacatccacaaagcatgagtggtttcagaaggctctgaagggtgatccgaaatacagaaactattatatcttcaaaaaaggaaaaaatggtcttccgcctacaaactgggtgtcaaaattcggtggaaacgcatggagctaccttccggaaacagatgagtattaccttcatctgttccatgtaacccaggcagacctgaactgggaaaacccggaggtgcgtcaggatatttatgatactgtaaacttctggctggaaaagggggtaaagggactgcgtttcgatgtgatcaacctgatctccaagccggacgtttatgaggatgatctggaaggggacggacatcgtttctatacagacggaccaaaaatccaccagtatcttcaggagctgaacgagaatacctttggaaaatatgacgatgtggtaactgtaggagaaatgtcttctaccacattggaaaacagtatccgctattccaacccggaatctaacgagctgtccatgatcttcagcttccatcacctgaaagtggattatccttccggaaataaatgggagatcgagcctttccgcttccatgatctgaaaaagcatctgtttacctggcaggaagaaatggaaaagggcggcggctggaatgctctgttctggtgcaaccatgatcagccgagaattgtttccagaatcggaaatgaaaaggaataccgtgtaaaatctgcaaaatgtcttgccacagcaattcacggtctgaagggaacaccttatatttatcagggagaggagatcggtatgacaaatgccggctatacctctattgacgagtatatggatattgaaagcctgaactattataatatcctgaagcttcagggtaagagcgaggaggaagtgatccgtattctgggcgccaagtccagagacaactcccgtaccccaatgcagtgggatgcttctgagaacgcaggcttcactaagggaactccgtggctgaaagtatgtgatcgctacaaagagatcaacacagagagcagacatgagccggattctgttttccagtattataaagagcttgtgaagttaagaaaagagcttcctgtgatccagaaaggcactgtgacacctcttcttcgcgaggataaagaaatccttgcatacaaacgtgagtatcagggaaaagagctttatgtgttctgtaatttctttgacggtgaagtaaaggtaccgtattccattccggaagactgcaagagcattctttctaattacggagaggagattagccccagggagcttgttttaagaccttatgaggcagtgatgttcctccgctgaaaagaggcatactatgaaatttaaagcgcttactacctgctttgccggaggcggaacaggtcattatacccagcagggcagattgagcccagatgaaaaaaatacagaaaatcaggtgatcaacctgcacccggagctttcctgggaagtatttgagggcttcgggggcgcagtgacagatgcagcggcatatgtgtattctctgatgaatgaggagcagaaaaaagaagtcctttctacatatttcagtaaagagggacttggctaccggcttctgcgtgttcctgttgacagttgtgatttttctctggacacctatgattcacttgtggaaaaagaacccgtaaaggtggcggtccagagagcgggaaaatatatttttccaatgcttaaagatatttttgcagtctgtgaggagcagccggagatcatggtttctccctggtctccgccggaatatatgaaaacaaacggacagcgccagcggggcggacatctgaaaagggaatactatccggactgggctgaatatatctgccagtacatccttgccctgcaggcagagggctttccggtaaaacgaatgtccattcagaacgaggccaacgcagtacagaaatgggattcctgcctgtacagtgcagaggaggagagggagtttctgaaaacagctctttatcctgcgctgaaaaaacatgggctggataaaattgaaatctacatctgggatcataataaggaacggctttatgaacgggcggtggaaaccattgacagtgaaacagaaaaaatgatcaccggaatggcctttcactggtacagcggagatcattttgaggaaatggagctggtgcggaaacgatttcccggactgaagctgatcctttccgaaagctgcctggaatactgcaaattccggtcagatgatgtgacagagggcgctttttctcttcttcatgagctgatcggggacctcaatcatggaatgagtatgtttcatgactggaatctctgtctggatgaagagggcggtcctaattatgttggaaattactgtcacgctccctgtcttttccataaaggaaagaaacggctgctcccccagccgacccttgactgtttttatcacatctcccattatctgcgtcccggaagcgtgcggatcgcccattctgtatacacagataagatagagtctgttgcctataaaaatacagacggaagcatcattctggttcttctgaaccggacagaaaaacagcttcctgtaaatctgaggcttcatggacagactgggactttaaatgttcttccccagtccgtcactacctgcacaatagaatacgaatgataaaaattttcggaataatacagaaatgatttgcagataaaataaggcactgcccacggataaaaacgttggctgtgccttatttggatgatctgttttttctttccttgtatcgtgaggactggtcattgcattttccgcaacaaccgcttacttatccggcttaccggatataattctgaatatattcctgagtggtgttgtcgatcaggtgataggtaagctctgccatggcttccggagattcatgctctgttctggacagccatgttttgatcattccgatacagccgctgagacaaaaggcataggcatagcgtatctcgctgtcagtagccggaaagctgctctgtttcaggaatttgttagcgatcagtgtctcaatccgctccacaaaatccatgtctccgttaggtcccagaagcgccagggaaagatcccggttgctgtccataatggagaaaaaacgggcaagaaagggaatgatcttttccctttctgtgcagtcgtcgggacagccctccatagcttcccggatgtctgccatagcttcctcttcaattttttcaagcatctggtagatgtctgtataatgcaggtaaaaggtggagcggttaatatccacttcgtctaccagttcctttacagtgatttctttgatactttttttctgcatcaggcgggcaagtccctgcctgagctgcatctttgtttttctgactcttcggtcaactttttcagccatgaaaaaacctccaatctttttgcaaaaaagggcattgttttggtagaaatgtcaaattttatgtttagtagacaaaatataaaaaaatgtcgattagtaaatattaagctctttttttgtcgcttgtattttttttcagttttagtataatacgttttgtaaagaaaagcaacatattgtttattaatagaaataaaaatggttaatagaatataagctattaatagaacaatgattgattaacagaatataatgtaatcaacagaatcaggcagattctgtacggcagaaagtgtctgatctgtttaaataaagtaatttctatataaaaatatatcatgaaagaaagggaacagctatgatcaaaaatgagtggaagaatctgctgaagaacaaaatgctggtagttgttgttatggctattatcataatcccggtcatttacgcaggattgttcctgaaatccatgtgggatccatatggaagtctggataaccttcctgtagcagtagtcaacaatgacaaatcagtggaatacgagggaaaaactttaagtgtgggcagtgatatggaagatgccctgagggataatgattcccttgattttcattttgtggacagtaaagatgcagagcagggcctgagaaatggtacatattatatggtaattaccattccggaagatttttctgagaatgcttctactctgatggatgagaagccaaagaaaatggaactggaatatgaaacaaatccgggaaccaattacattgcttccaaaatgagcgagagcgctgttgtaaaaatccgtgacgaggtagcttctcaggtaacagaaacctatactcagacagtttttgaccagattacagaggttggagacggtatgcaggaggctgccgatggttcaaaggaactgaaggacggacttggagatgcttctgacggaaataaaaccattacagacaatctgaaaaagctggcggacagcacgcttacctttaaggatggagcaaatactctgacagaaggtctgaaagaatatacggacggtgtggcgcaggtagatgacggagctacacagctgaatgatggagtgggaactctgacagcaaaggttcctgagcttacagccggtgtaaatacactgaatcagggtgttaaggattatacagccggtgttgcaaagcttgacgccaattctgcgcagcttacggccggaaccacagatcttcaggaaggagcagagactctgaaaaaaggtctggatactctgaaggacggaaccacccagtatgtaagcggagccaatactcttgcagacggagtgactcagtatgttgccggagctgaccagctggcagccggagccgcgcagctctctccactggaggggatcgatcaggtatcttcaggcatttcacagctgaacagttctgtttccgaaggagagggttctctgaaagcaggaacagaacagatcgaagccggattaggagaactgtacggacagttaaaagagcttggcggaaacctgacagcagaaaatattaaaaagctgacagccggcttaaacgaagcaaaaagcggaatggaaagcgcgggcaaaggaatgactactgcttctgccggaatgacccaggccgcagagggaatgacaaatgcggcaggcgtgatcactcaggcagggcaggggatttcttctgtggcagcccaggttcagaatgcatccaggcctgtggcagatgcagtaaacggagtggctggcattgtaaatcagtgtgctcaggatgcaaatggaaagttggatgcggcaagatcacagattgatgcggcaaacgcacagattgcttctgcaaacggacagatcgaggcggcaaaccagcagatatcaggtatgcaggcatctatggcaggcgcccaggtagccattcagggaatccagggttcagccgacgaaaacggaatggtttccgcagcaagcctgaatgctgtgatcggaatgcttggcaattctgcttccggtgtatccggagtagatgcagtacagaacaatgtggaaaacatggatgcttctgcctatacagcacaggcacagcagattgcagacgcagcctcacagcagctggcaggcgtacaggaaaccttaaatggaacagcaggacagctgaatgaagcggcagaaggactgaaaaagggtgcagagactcttggaacaaaatcaggagaaatgaaggcgggcgcggatcagatggaagccggcgctcagaaaatggcagccggagcagaaaatattccttcaatcccagcggatcccatcaatcaggtgacaactgctgtgggacagctctatgcaggatctcagaaagtagatcagggtgtgggagcggtagcctctgctctcgatacactggaagagggaacaaaagatttcccgaaggcagctgcaggtgtaaaggctctgaatgaaggatttgcacagctgacagccaatgataaagctctgacaacaggagcaaaaactctgaaagcagcaggcagcaccgtaacaggaggcatcagtcagctgacagctggaggcagggatctggcagccggagtcggtactttaagtgaaggaatcaaaacctatacagccggagtcagaacactggcaggaaataatgaagctcttacctcaggaactcagcagcttgcatcaggagccggaactcttgcatcaggagccgcgcagcttgcagaaggcaccaaaactctgaaagccggaaccagtaagctggttgaaaacaacagtactctgaacagcggcgctgaccagctcgctgacggcgcaggacagatccaggacggctcttcacagctttatgacggctcaaaggaactgggagacggaatcaaaaaattaagcgacggttcagaaaccctgcagacaagtctcagcgacggcgcaaagcaggtaaaagaaacaaaagccaatgatgatatgataagcatgtttgccgcaccggttaaagaggaagaaacacagatgacaacagtggagaataatggtcacgccatggctccttatatgatgtctgtaggtctgtgggtaggctgtctcgccttctgtctgatgtatcctctgacagagtacaaaggaaaattaaaatcaggcctggcatggtgggcaagtaaggcgtcggttctttatccggtagcagtccttcagggagttcttctgatcgttctgcttcacctgatagacggattcacaccggcagaaatgacgaagacagttcttttctcctgtctggcagctgtggcatttacatctattatgtatttctttaatattaccttcggcaaggtgggaagcttcctgatgctgatctttatggtagttcagcttgcaggttcggcaggaacctatccggtagagatttcaccttcctttgtggcaaagattcataattacctgccttttacctatactgtcaatgcattccgaagcaccattgcaggaggcgaaagtataggaacagcagttgttgtactgcttgtgctggcaattatatttacagtactgacgattttacagtttaaccatatggcacatgccagaaagagcggaaagaaggttctttatgactggctggaagcacatggagtagcataaaaaaagaaaaacgctgcaatccggaatcaactgaggattgcagcgtttttcagcaattatgtattatttctcaacgatctcaagaatttccattggacaggcttttacacagataccgcaggctgtacatttggatgcggttggtttgtcctcagcctttaccatcaggccgaacggacaggcttccacgcattttccacagccggtacacagttttttgtttaccatgtatacgccttttgcgttctgagtgattgcgcctgcttcacagacctctgcgcattttccgcactgaggacatgccattggctttggctctcccttgcgttctacaatctgaatgcaggattttaatacattagattccttgtaataagcatttgaacaggcctctacacattccagacatgccatacaggtggcgcctttttttactgtcagttttttcattaccttacctccgctttttgttgtttttaccatactcatcatctgctgtgttcagcttgttacattatatcattctttctgtatatctacaatttgttttgtgctttttttcacaaagaatacatttgaagatgattgtttaaagggaatatctggtgaggcgttctggcatatttttgccggaatccagatacatgcagggcaaaatgccattattggaagtaatttggaatacattttgaccacgctgctgtgaatggagtgatctgcaatttataacggatattttggatattttttatgaaggtctggtgttagtctgaagaatggggtatgataataaaaagggacatttaacagattcctcacatttttcccacaaagtaaacacaaattttttttatactcagaccatcaaaaggaaaacagagatattttcaggagggaattgattatggagaatatgaacaacaacatgaatgataatcttaataacataaatgataataatgaccgggacaacaaaaaagataagaaaaaaatgagctttaaaaagggagcgggaattgctttctgcgctgttctggcaggaggccttgcatttgaaggcgtcagcgctgtaagcggctgggatttcagcaacattgtacaggcatcggataaggacgaaaataaaaccacacttttgaaaacaaagaagaaatcagacgataaggatacggaaaagactgaggaaaaaacagaggattccaaagataaggatgaaaaggcagaagaggattctgaacagaaagtaaagggaagtctggacgtatctgatattgcggcagaggcaatgaaatccgtagttgccattaacaccaaatctgtgcaggaggttcagacctatatcggagactttggtttcggaggatttaccactcaggaacaggaggttgagggaagcggctccggtatcattgtgggaaaaaatgacgagtctcttctgatcgcaacaaactatcatgtaatccagggtgcagatacggtatctgttacctgtattgacggcgaggtttatgaggcaattgtaaacggttatgatgcagataaggatcttgcagttgtttcggttgctctttctgatatttccaaagataccatggagcagatcgaggttgccacagtgggaagctccgatgatctgagagtaggcgagcaggtagttgccatcggaaatgctcttggatacggacagtctgtaacaacaggtattgtcagcgccaaaaaccgtaaactggatgattccggacaggcagatgaaaattctgacggtgtaaacctgattcagacagatgcggctattaatcccggaaacagcggcggagctcttctgaacatgaacggagaggttgtgggaatcaattctgcaaagcttgcttccacagaggtcgagggtatgggatatgccattgccattacagacgtatctgatattcttgagaatctcatgaatgagacaccgagggataaggtggagaaacacggcgccctgtccattacaggcagctcagtaagtgaagaagcatctgcggtttatgatattccggaaggtgttctggttgcagaagtgatcaaggacggagctgctgacaaggcgggaatcgaggaaaagaatattattacagagttcgacggcaagagagtccgcagcattgaagccctggttgatatgcttcagtactatgagccgggtgaagaggttgaagtaacgcttcaggttctcggaaacggaggttatgaggaaaagaaggtaacagttactcttgatgagggaacctctgaggagtcggcagcctctgatacagcagcacaggagccgtcacaggaagaaagtatcctggatgagtttggaaacagtgcagaggatgaagaaacctataatgagttctttggcgacatctggtaaattgcagacacagtttttccattaatataaatatataagcacagaagggaccggcaggatcagccggtcttttctgtgctgtattgaaacggcagggcaggtctgttatacttaaacacagagatttcgggaaaatgtggaaaagcaggttcccgcagatgaatatatgtggaaaacggtgacagaatatgaaaaaaagaaacgtgatcattgactgtgatccaggggtggacgacgcggttatgcttgctctggcagcagctcacagagaagaactggagattctgggaattacaactgtaagcggaaatcaggatataaaaaaagtaacagcaaatgcattgaatctggcagaattttacggattatcagttccggtggcccggggaatggaaaagcctgtcatgcgaaaaacgtattttgcgccggaaactcatggagaaagcgggatcgggaactgtgttcttccgtgttccggaaaagcaccggagccggaaaagggaatattttttatccgcagagttctgggagaacttcctgagggagagcaggcaacgatcattgccacaggccctctgacaaatattgcttttcttctgaggatttttccggaagtaaaagaaaagatacaggagatcgtttttatgggcggttccctgtcaggaggaaacgttacagatgcggcagaatttaatttttttgcagaccccgaggctgcgtatatggttttgcacgagggagttcctcttgttatgtgcggtctggatgtgacagaacagtgtactctgtcaagaaatcagattctgaagctgtgtcagtcaggaaacagaatcgcaaagctctgcggagatatgctgggttattctctggaaaacacatcagaaaaatacagaggggaaaccagcgtacatgatgcggttcctgtgatgtatcttcttcatccggagatatttaagggaagtcagaaaatcctgaccgtagactgttctgagggaagcacccggggtgcggtactggggggcttccgctggtggcagcatgaggaagaggatgccaatgcttttgtactgactgaggcggataaagacaggttccgggagattctgatcacttctctgtatgagctgggacagcgctgaagcattatattccgtaaataaaataaaggaagcaaataaatgaattatataatttttgatctggagtggaaccagagtccggagggaaaaagcggatcggatgagcggatgccctttgagatcatagagatcggggcggtcaggctcaatgaaaaaagagaaaaaaccggagagtttcagactttgatcaaaccccaggtgtataagtggatccatgacagcatccacagcgtagtacatgtggattataaagaccttatgaacggagtaccgtttcctcaggcaatccgggactttctggactggtgcggagaggattttgttttctgtacctggggaatgcaggatctgactgagcttcagagaaatcttaaatattatgatcttctggagcttcttccgggtccggtgacttactatgatattcagaaacttttcagttggtttcacgaaaatatgaagctgcgaagggggctggaatatgcagtagataccctgggaatcagaaaggaaaggggatttcacagagctttggaggatgcagaatatacggctgaggttttctgcagacttgatatgtcagaggtcctgccttattattcagttgatacgtatcaggcgccgagaaataaaaagcaggaaatttacatttcttatcctacctatgacaaatatatttccagacagtttacggaccgggaaaagatcataagggaccgggaggtttccagtacccggtgtccggtatgccatcttcctgcaaaaagaaagctgagatggtttattaataattccagaatatatgaaagtatttctgtatgtcagaagcatggaagcataaaaggaaaggttcgcatcagaaaaacagatgagggcacattttatgcagtaaaaactctgaaacgggtaagtgaagaaaaagcggaggaactccgtgagaaacgggactccctccgcaaaaaacgcagaacaaagaatcagtgagatgaaataagccggtcagatagcagggtttcaaaataatactttgcgcaacctgtcctctgtccgttgaagctgtatgtgatttccagaattggaagccccacggagtttttgcacaggcttcggctggaattcagtgtgctgatatccgctccgttgggaagcgttacagacggaacctgataccggtgacacagggtacagtctttataatccttcaggatatatttttctgcaggaagataagatacagacatggtttccggttcagtttttacagctgttctggtaaagttattaaaaccataatccagaagcgcggctgtatctgcataggctccgttaatggatttcattacaacggaaacaagacgcatgtttcctctttttgcgtatgtgacaagggtattgcccgcagcgtctgtgtatccggttttgcctcccataacgccctcataggcgtaggtgttgcctttcatcattttgtgatggttcagaagataccgtgtttcagcaaatttgttggtaggcggtatctcataataggtcgtggtggtatatttccgaaaagtagggttataccaggcagcccgtgcgatttttgccatatcggaggcggttgtataatgaagctcgtcaggcagtccgttgggattgttaaaatgagtgcctgtacatcccagctgctttgccttgagattcatcagttccacgaatttttttacagagccggaggtctcttccgcaagggcaagagtcatttcattggctgactggagcataactgccatcatggcctgttctgtggtaaattcctctccggtatcagcgtaaatgctggaactgtcgctgatggtgattccataggctgcagactgcgacattacgattttgtctttcatgttcagatgttcggctgccagaagagaggtcatgatctttgtaatactggcagggtactgaaccttgtctgcatttttggaatagagcactgcgcctgttaccatatccaccagaatggcagattctccttcgattttcggtccctgaggccagccttcaatactgtctgtatcaggagcctgctcatagtattctgtgtgaggaaccggagtgggcgtggcagttacaataggagctccatactcatcatattctgctgcggaagcggaaactgcgggagaaacggcaatcacagtacacagaaatccgcagagtatttttctgatatgttttatttttctgtttttcatgttcagaacctttctgattattctatattaagtaatattctttgcattttatcccctatagtataccatacttatatctgagattgtagccatatcttggaagtccggcagctgttcacagtaaccgggccaaaatgccccataaaaagtaatttacagattactgtttggtgagaggtcctgagtgatattgtcaaaatcctgagatatcaaaaagaggacccggatcggtcaaaaaagaagtttaaaatatctggaaaaaagtatataattttcataaattgcggaatgatatcttgatttatttatgacaaaaaatggaggcaccatgaaaaagacgggaaacagagaaacggctttgatattgcttggtatttttatagtggggttttttgtgttttttacaaacaatttctataaaagtgtatgggaaaaaagcggtctggaggaagctgaggaaacaaggaattatgacaaacagtatgaaatgatcgtgggaagcggcaaaaatgagttctggcaggcagtgtacgagagcactttggaagctgcccaggagcatgacgcttatgtacagtttcatgcaagggatatgggagacggctatgatgaaattgactatatggagattagtattgctgcaggagcagacgggatcattctggaatttaacggagaagaaagcctgaaagcggagataaataaggcggtagaggcagggattcctgtgatcaccattatgagcgacgcgcctgacagcagccggcagagctttgtaggcccaaatgattatcaggtgggacaggcatatgggaagcagattgcaggtcttcttgatgaaaaaacaaaatctgttcttgttcttatggacagcgaaaacggaaattttgaaaaaagccagatctacagtcagatcagtacagcggttatggaagaagatcatggacagaagatagatgtcaaagcggaaagcatgacttcggataacaagtttgatattgaagaagtgatacggtcgatttttcaggcgccggagggaccgccccagattcttgtatgtatggatgagattacaaccgaatgcgcataccaggcaatgattgattttaatatggttggcgagataaagatcattggatattatgtttccgacacgatccagaaggctgtagaaaaggggctgatccctgttaccagtacccttgatacggcaaaaatgggaaaaaactgcgtggaagccctgtgggaatttgagcaggaaggacgggtaaattcctattataacgttgaacttcagtttcttacaaaagaggatatccgtgacgcaatgccgacagacagtggggaggaataataattggaagaagaaaagaaaaaaagaagacgatggagagatattcctctggccacaaaaatgatcctggcggtgggaagtattatggttatgatgcttgtgatcaatatgatactttacgagcaggtaaataagacgatcaggcggatggacactgtgtattccagtaacgtggatcttacagatctgtcagcttctctggagaacgtgcagcaggctctttattcctacttgagtgtaaaaacctcagattctctggaaaattattacagatgtgaacaggactacagatatcttctggaaaatctaagcagtcagatttcttccaatcccacaaaacttctggaacggaatatcaggcagatgtcagaaacctatctgtctcttaccggggaaggagttgcggccaaaagaggacgtaacgtagaaaagtacaaagagatctacgaccagtctcaggaactttacggctatattaattcatatatttatcagctgaacagccagcagtttcggaataactcatccagctaccaagcccttcgggaagcccttcgctatctggaaatatcaagccttgtgcttatggcggtaatgatggggatcggcgcgctggtgctttttgccattacaaaaggaatgatcgagcctctggcaaatctggcggaaattgcacacctggtaggacaggggaattttgacgtaaaaatgacaaaaacagattctctggacgaggtgggagttgtaacaagggcttttaataccatggtagaaagtctgggagaatatgtggtaagaacaaaagaaagcatggaaaaagaacagcagatgatggaaaaagagcttctgatgaaaaatcatctgaaggaggcgcagttaaaatatctgcagtcacagatcaatcctcattttctctttaattccctgaatgcgggagtccagcttgccatgctggaggatgcggaaaaaacctgcatctttgtggaaaagatggctgactttttccggtataatgtaaaaaagggactggaagacgccagtcttggagaagagcttacagctgtagaaaattatatttatattttaaacgtacggtttgcaggagatatccattttacaaaaaaggtggacgagagtattatggagtgccgggttccaagtatgatccttcagccccttgtagaaaacgcagtcaatcacggaatccgcaatattgactgggaaggaaaaattcttctggaaattaccggattggaagataatatcctgatacgggtgaaggataatggaaaaggaatgagcgaggaaaggatcagggaagttctggacggatgtatggaagatacgggagaacagtctgattctacaggcgtgggaatgaataatgtgatcagccgcctggagctttattatgataaaaagaatctggtggagataaacagtccgggagagaatatgggaacggaaatcatactgacccttccaagaacaggaggagagaaatagatgtacaggatcatgttggcagacgacgagggaattatgctggaagccctcaaaaatattattacgtctaattttggcggagagtgtgaaatcgccacggcaaaaacaggcagggcagtagtggaactggcggaaagattccgaccggatattgcctttatggatattcagatgccgggtctgaacgggatccaggctatgaaagaaatccaaaagacaaataagaatattatttttattgtaatttctgcttatgataaattcggttatgcaaaagaagcaatcaaccttggggttttggaatacctgacaaagcctgtaaataaaagagtagtgatcgacgtctgtatgaaggccatgaaaaaggtggacgaggacagacagaaaagaagcgacgacctggagatcagggaaaagctggaaaccgtaatccctattttggaaagcgggtacttatataacattcttctgatggacagctttcataattataatgataattacaggcagcttcttggaatccaggagaagtatggatttatgatcgtggtggaatttggagacagccaggaaaacggtgagctgacaaatgcagtaggcgcaggggtacgtgcggaaaagttttacccggagcttcgggaaaccgccagagagttttttcactgtcttgtaggtcctgtaatgggaaaccgggtggtgattcttgtgccatatgagaatgaaactattgattatgatgaacgtgttcatatccttacaaaaacaagaaatatggtgtataagctggaaacaaggatagacagccggtttcgcgccggaataggaaggatcagggaggagcagaatcttcgggaatcatattcggaagcagttcaggcattgagagaaacagacagtcacgtagttcatattaatgatattcccacaaatgaaaagaccggggaggattgcccggaagaactggaaacaaggtatatccagaaggtgttaaagagagacatgccgggaagctcacagggcgcggaggagctgctggactggatggaggatcattataatggaaatatgggagcaatgaaaataaaagctctggaactgaccgttaggctggaacagaaggttgtggcaacgggaggcgcaggaagaaaatttaatcagaaggaaaacagcgtacagaagcttcaggagctgaaaagcagagaggagatcggaagatggctctgggaacagaccagggaaatcagcagaaatgtgggaagcgcaagagagaagccgtcggaatctgttatggaaaaggcaaaagaatatataagagagaacttccagaaggatcttactctggacgaggtatcgaaagtggtggatatcagtccctattatttcagcaaactttttaaacaggaaacaggagaaaactttattgagtatcttacaaaggtaagaatgaaaaatgcggaagagcttctgaaggattccagctattctattaaggaaatctgcactgcgtcaggctacggtgatcccaattatttcagcaggatttttaagaagtatgagggagttacgccaagcgaatacagagaaaggctgggataaatatatgaaaaagataacaggcgtctggatcatcgggattcttgctcttatagttctggcgggctgtggtcaaagggagcagggaaaggaaatagaaaaaaaagcagtcagcatcgaagaagaaaataaaactaccataggcttaagttttgattcttttgttatagaaagatggctgcgggacagagacgcgtttgtggctgccgcagataatctaggtgcagaggtaaacgtacagaacgcaaatggagatgtagaagaacagattgaacagatccgctatcttataaagaaaaaggtggacgtgatggttgtggtggcagcagactgtatggaaatttcggaagtcatgctggaggcaaaagcagcgggtattcctactatatcatacgaccgtctgatccagaatgcagacacagatctttatatctcttttgacaatgaaaaggtaggacaatatatggcagaggttcttgttgaaaatattcctgaaggcggaaagatatttatgatacagggtcctgaagaggataacaacgtaaagctggtaagaaaagggtttgaagaaggattagaaggcagcaaaatagaagtggtctataggacaaactgtcagggttggctggcagaacaggcggtggacgctttgaatgaggggctgaaggagttttcggatgtaaagggaattatgtgcggcaatgacgatattgcaagccaggtggtcaatacccttgcagaaacaagacgggcgggaagccttgcagtggtaggtcaggacggagatcttgcagcctgtcagagaattgtggaaggaacccagaccatgacggcttataaatctgtagagagccttgcggagcttgctgcggaactggcagtgaagctggcccagggagagaagccgcagctggatggaacaaccatgaatgacggaaagtatgacattccctgctgtcttctggagccggtggctgtcacaagagaaaacatggataaagtgatcattgacggaggagtacacagtagggatgatgtgtacctgaatgtgcaggatcagtaatattgcacaataaaaattgtcaatagcatatttttgttgcaaaaatgtcttgtatcttacaggacatttttgaatttccaaaaaatttacaggagtttgccaactaactccagacagacctgtgctatagtaataacatcaaaaggaacgaaaaaaaaattaaagaaaatggaggaattcattatgaagagaaaagttcttgcaggtcttctgacagtagttatggcagccggattcgtggcagttccgggaatgcagacagaagtaaaggctgatgacaaaaagctggttggcgttgcaatgccgacaaaggatcttcagagatggaatcaggacggagaaaatatgaagaaatctctggaagatgccggctatgaagtagatcttcagtatgcttctaatgaggttgctactcaggtatctcaggttgaaaatatgatttccaacggctgcgatattcttgttattgcatctattgacggaagttctctgggagagccgttaagccaggcaaaagaggccggtatcccagttatcgcatatgaccgtcttctgatggaatctgatgcagtttcctattatgcaacctttgataactacatggtaggacagaaacagggcgggtacattgaagaggctctgaatctgaaagaggaaaaaggcccgttcaatattgagctggttgcaggcgcaccggatgacaacaacgcaaaattcttcttcagcggcgcaatggacgtacttcagccatacattgacgaaggtgtccttgtagtaaaatccggacagacagaatttgagaaatgcgcaactcaggcatgggattccgctaaggctcaggacagaatggatacgattattgcaggtaactatacagatggaacaaatcttgacgcagttctctgctccaatgactctacatcccttggcgtacagaactctctggcagcttcctacacaggagagtatccggtgatcacaggtcaggactgcgatatggcaaacgttaagaaccttgtagcaggaaaacagtctatggatattttcaaagatacacgtatgctggcagatcaggttgtaaagatggttacatctgttctgagtggtgaagaagcagaagtaaatgatacagaaagctatgacaacggaacaggcgttatccccacatacctctgcgagccaactgttgtaaccgctgacaactacaaagaaattcttattgattccggttactatacagaggatcagattaaataaaacatgatgattcataagggggcggcctccgcccccttatcatttcaaatttagggagggatatcattggctaaaatacttctggaaatgaaaaatattaccaagactttcccgggtgtaaaggcactggacaatgtaaatctgaaggttgaagagggagagatccatgctctggtaggtgagaacggggcaggaaaatctacgttgatgaatgttctcagcggaatttatccttacggttcctacgagggagacattatttacaacggtgagatctgcagatttacaaatattaaggacagtgaagcaaaagggattgttattattcatcaggaactggcactgatcccctatatgacgatcggggaaaacatgtatctcggaaacgaaaagggacctgcattctctattaactggaatgaaacctacggagaagcagatgaatatttgaaaacagtaggactggaagaatcttcccgtactttgatcaaggatataggcgttggaaagcagcagcttgtggaaattgccaaggcgcttgcaaaacatgcgaagcttctgattttggatgaacctaccgcttctctgaatgaagatgattcaaaagcgcttttggagctccttctgaaattcaaaaaagagggtatgacatccattattatttctcataagcttaatgagatttcttatgtggcagacaagatcacagttatccgtgacggctccacaatcgaaactctggataaaaaaacagacgacatttcagaaaaccgtatcattcagggaatggtaggacgtgagcttactgaccgttttccgaaacgtccccatgtaaaaatcggagacgtgtccatggaggttaagaactggacggttcatcaccctctttattctgagagaaaggtagtggacaatgcttcctttaaggtacataagggtgaggtagtaggtatttccggactgatgggtgcaggacgtacagagcttgccatgagtatttttggaaaaagctatggtacaggtatcagcggtcaggtatttattgacggcaaagaagttaaaatgaacacggtcacagatgctattaaacataaagttgcctatgtaactgaggacagaaagggcaacggactgatcctttcaagtcccatcaagatcaacactactcttgccaatctgaagaatgtaagcaaacgcggggttcttgataatgacaaagaatatgcggtggctgacgagtacagagagaagctgaaaacaaaatgtcctactgtagagcagaacgtgggaaacctcagcggcggaaaccagcagaaggttcttctggcaaagtggatgtttacagaaccggatattctgattcttgacgagcccacccgtggtattgatgtaggcgcaaaatatgagatctactgtattattaatgacctggttgcagcaggcaaatctgtaatcatgatttcttctgagcttcctgaggttcttggtatgtctgacaggatctatatcatgaacgagggaaaaatcgtgggagaggtcagcggacaggaagctacccaggaaaacatcatgtcacgtattctgaaatcaagcaaaggagaataagccatggaaaacaagatcagattttctgaagtattgaaaaaatatacgatggttattgtgctggcactggtaatcattctgtttacagtgaataccggaggaaaaatgctccttccccagaatgtcaataacctgatcgtacagaacgcatatgtatttattcttgcaacaggtatgttgttctgtattctgacaggaggaaatattgacctgtctgtaggttccgttgtctgcttcgttggcgccgtaggcggaaaaatgatggtgacaaacgaaatgaacccgtatctgtcaatcattgttatgcttctggtaggtcttcttatcggagcatggcagggattctggatcgcctatgtgcgaataccaccgtttattgtaacccttgcaggaatgttagtattccggggactttccaatgttgttctggaaggtatgactctggctcctatgccggacaatttccttgcactgtttaacaactatattccggatttcttcggaatggaaggctttaacatgacctgtttccttgttggtgtggttgtctgtgtcctttatgtatttatggtactgaagggacgggcttccagagctaaaaaaggttatcgtgtagagccctttggcggtgtgctgattaaaatgatcgtgatctgtgcagcagttctggcatttatgttccgtctggcacagtacaaaggtattccgaactctctggtatggattgtccttgtaattgcagtttatacctacattgcttcaaagactacagtgggtcgttatttctatgcagtaggcggcaacgagaaagcaacaaagctttccggtatcaatacaaacagagtttatttcctggcttatctgaacatgggattcctggcagcagttgcaggtatggtcacaacagcccgtctgaactctgccaaccctacagcaggaacaaactttgagatggatgcaatcggcgcctgctttatcggcggtgcttccgcatacggcggaacaggaactgttcccggagttatcattggcgctcttctgatgggtgtcctgaaccttggtatgagtatcatgggcgtcgaccagaacatgcagaaggtggttaaaggccttgtacttctggcagcagttatctttgatgttgtaagtaagagaaaatcttttattgtaaaataaaacaacagaatcaaaagccggtttcgtgtgaaatcggaagctgcccccggaccgatgggaaactgtcggcgccgggggcggtttgtatacatattactttttgaaaaggagatgaaaaaccaaaaaagagatggtacaataagattaactcattcgacatttttcgagaaaaagtttataagacaccagggaggaaacaattatgccatgtactacaattttaattggaaaaaatgcaacctatgacggttccactattgttgcgagaaatgaggattctccgtcaggagagttctgcgccaagaggctggaagtgatgaagccggaagatcagccaaaggtatataaatctgtgctttcccatgtggaaatccctcttccggagactccgctgcagtatacataccttccaaacagcgatacagtggagggaatatggggcgcttacggtgtcaatgaaaaaaatgtttccatgacagcaacagaaactcttaccaccaatgccagagtggccggaggggatcctctggtgcgctacaaaaaggctgagggcgatgaaccggaaactgtgggaggtatcggagaggaggatatggtgacaattactcttccctatatttcttctgcaagagagggcgtggaacgtctgggaatgcttctggaaacttacggaacctatgagatgaacggaattgcctttcaggatgaaaatgaaatctggtggctggagacaattggcggtcacaactggatcgcaaaaagagttcctgataacgagtatgtggttatgccaaaccagcttggcacagacagctttgatctggaagatgcttatggcaaaaaagaaaaccatatgtgttcccccgggctgaaaaagctgattcaggagaatcatctggacgtgcgtatggattctgaggaagagtttaaccccagaacagcctttggatcccatgaggatgcagaccatgtttacaatactccccgtgcctgggtgatgcttcggtattttaaccccagaacctttgcctgggacggaccggaagcggagtttgggccggaggatgatgatctcccctggtctcttgttccggaaaaaaagatcaccctggaagaagtaaaatggatactttccaattattatcagggaactccttatgatgtttacggaaaggatgccaaagcaggtaagtacaggcctatcggtatcagcaggaataatgctcttggacttgtgcagatccgtccctacatgcccgaggatctgaaagctcttcagtgggttgctctgggttccaatgtgtttaacgctatgattccggtgtacccgggagtggacaaaatgcccgaatatctttcaaaggcttatgtgaagccaacaacagagaatttttactgggtaaaccgtattatcggggcgctggctgacgcgcatttctatgaaaatcagtccaatattgagcgttatcagctttcagtagaccgtaagttatatgaaatgatccgaaaatttgatcaggaatttcaggaaaaagagcctgaggataaaaaggcgttttttgaagctgcaaatcaggaaatttctgattttattcaggaaaaaacaacagaattgctggataaggttctgtttacttcaagctgcctgatgagaaatggattttccagaagcgatgcataaaagaaatcctgaataagacaggagaattccggaataatttggaaaagcttataataataaaatgttaaaacgcaaatgcaacgtatttttttacgttgcatttgcgttttgagagtgatacgataaataaaaggaatctggaggtgtggagtaaaatgaaagagaataaaaatttagaatttaagtctgcagtcactaattcatttttaaaaactgtcagtgcgtacagtaattttggagagggtatgattttatttggagtcaatgatgatggctctgtatgtggaatcaaaaatcttcagcagacatgcctggacatagaaaatagaataaatgacagcattattccaaaaccggattttgagatagagacagatgatttacaaaatataatcaggctgatcatacatgagggacagtataaaccatatttatattaaggaaaagcatacaggagaagtgatacagcgtctttggaggtggatcaggcagaactgaaacagcttgttttacagggaagtaatttatattttgaagaactggcgtgtggaagagaggatctgacttttcagaagctaagtaacaagttaatggaaaaaatggatatcagtgttgtttcagaagatatattacgtacccttggactttttacgaaggacagaaagtttaataacgcagctgccctgttagcagatgaaaacgatttttatggaattgatattgccaggtttggaaattccataaatgaaataatggacagagaaacaatttcagggacatcggtattaaaacaatataattctgctctggctatgatcagaagatactatcaatatgaagaaatatccgaaatagaacgtaagaaggtagatctgatcccggaaaatgcttaccgggaggcagtagcaaacgctttgattcacagggattggagcatgaattctcatattcgtatatcgttatttcctgataagattgagattaaatctccaggaggacttccgagaggaataacagcagaagaatatatgaggggagatatctcctgtttgagaaatcctgtattgggaaacatgtttttcagaatgcactatatagaaatgttcggaacaggggtaagacgcattttgcttgcttatgaaaatgcaaaaattaagccaaagtttgaaattacagataatgtgatcagtgtcatattgcctgtgataacaaaccagtatcatattacaagtgatgaagaaaaaataataaatgtactggagaatggaaaacaattgtcaagcagtgagattgtgaaggcaacaggttatacgaaatctaaagttctgaggctgattgagcatttaaaagaaaaggattatattaaggttacaggcaaaggcaggggaactaaatatagtttgtaggcggctgtagtttattgttcaggaggcatttgtaaaggttgtgaacagcagctgctgtttacaggtgaaaaccccggaaaaagggcttgacagatagattttgtccattttataatagaaaggcacatataatcatgtaaaaacagtgatggagacagtaagccgcaggattttcgtgtcaggcagtgccagatggggaagttcgcacagaacgctgcagagagccggggacaggtggaagcccggtgcaagtaagaacggctgaagatcactccggagtttctttcccgaaattgagaaaaagtagggacagacggtgttcccgccgttaagtgggacagatatcggcagaattctgcccgtattgtgtaacaggtggtgcgaagaagcgtagatccagctctcgtccttttacaggacgggagtttttttatttataaggaggaagcaatcgtgtatcagaaggtagatacgaacctgaactttgttgaccgtgaaaaaaaggtggaacagttctggaaagagaacaaaatttttgaaaaaagtatggacagccgtaaggaaggagaaacctataccttttatgacggaccgccaaccgctaacggcaagcctcacattggccatgtactgactcgtgttatcaaggatatgattccaagataccgtacaatgaagggctgtatggttccgcgtaaggcaggttgggacactcacggtctcccggtagagcttgaggtagagaaaaagcttggccttgacggcaaggaacagatcgaggcttacggtatggagccgtttatccagcagtgtaaggaaagtgtctggaaatacaagggaatgtgggaagatttttcttctacagttggtttctgggcagatatggatcatccgtatgtaacctatgatgataattacattgagtctgagtggtgggctctgaaagagatctggaacaaaaatcttctttacaaaggatttaagatcgtgccttactgcccgcgctgcggaactcctctttctgcacaggaggtttcccagggctacaagactgtaaaagagcgttctgctattgtacgttttaaagtggttggcgaggaggcatatttccttgcatggacaaccacaccgtggacactgccgtccaaccttgcgctctgcgtaaacccggatgagacttactgtaaggtaaaggcagcagacggttatacttattacctggctgaggcccttatggacaaggttctgggcaagcttgcaaaagaggatgaaaaagcatacgagatcctggaaacctataagggaaaagatctggaatataaagagtacgaacctctctgggagtgcaccagagaagcagcggcaaagcagaagaaaaaagcgcatttcgtagtatgtgacagctatgttaccatgagcgacggtaccggtatcgttcatattgctccggcatttggtgaggacgataaccgtgtgggacgcgattacaaccttccgtttgtacagtttgtagacggacagggaaatatggcaaaagaaactccatatgcaggtgtatttgtaaagaaagcagatccccttgtacttgttgacctggacaaagaaggcaagctttttgacgcgccgaaatttgagcatgattatccgcactgctggagatgtgacacaccgcttatttactatgcgcgtgagtcctggttcattaaaatgacagcagtgaaggaagacctgatccgcaacaacaataccatcaactggattccggagaatatcggtaagggacgtttcggcgactggctggaaaatgttcaggactggggtatttccagaaaccgttactggggaacacctttaaatatctggcagtgtgaatgcggacatatgcattctgtcggaagccgtcaggagctctttgagatgagcggtgatgagaaggcaaaaactgtggaacttcaccgtccgtatattgacgagatcactctgaagtgtccggagtgcggcggaaccatgcaccgtgtaccggaggttattgactgctggtttgattcaggagcaatgccttttgcgcagcatcattatccatttgaaaatcaggatctgtttgagcagcagttcccggcagattttatttccgaggcagtggaccagacaagaggatggttctattctcttctggcagagtctaccctgctgtttaacaaggctccttacagaaatgttattgttctgggacatgttcaggatgaaaacggacagaagatgagtaagtccaaaggaaatgcggtagatccttttgacgctctggaaaaatacggcgcagacgctatccgctggtatttctatatcaacagcgctccgtggctgccgaaccgtttccacggcaaagctgttgtggaaggacagcgtaaattcatgagcactctgtggaacacttatgcgttctttgtgctttatgcaaatattgacgagtttgacccgacaaaatacaatctggactatgacagccttccggttatggacaaatggcttctcagcaagctgaattctgtggtaaaagctgttgacgaaaaccttgcttcctacaagattccggagagtgcaagagcacttcaggaatttgtggacgaaatgagtaactggtatgtaagaagaagccgtgagcgtttctgggcaaagggaatggagcaggataagatcaatgcatacatgaccctgtacacagctcttgtgacaatctctaaggctgcagctcctatgattccgtttatgacagaggatatgtaccagaaccttgtaagaagcgtagatccgtctgctccggaaagtatccatctctgtgatttcccgcaggtaaaagaggaatggatcaacaaagagcttgaggatgacatggaagctcttctgaaggtggttgttcttggccgtgcagcaagaaatactgcaaatatcaagaaccgtcagcctatcggaaccatgtttgtaaaggctgagaaggaaatggatcagttctatacagatatcattgcagatgagctgaatgtaaaagaagtaaaatttgcaaaggacgttgaatcctttatttcctacagcttcaagcctcagcttcgcacagtgggaccaaaatacggaaaacttctgaacggtatccgcacagctcttacagagcttaatggaacagaggctatgaaagaactgaaggagacaggacttcttactctggatattgacggaaacaaggttgagctggctgaagaagatcttctgatcgagacagctcagacagagggatatgtaacagaaacagacggagatacttctgtagttcttgatacaaacctgacttcggaactgatcgaggaaggatttgtacgggaaatcatcagtaagattcagacaatgagaaaagaggctggctttgaggttatggataagatccatgtttatgcaaaagataatcagtgcattatggatattatggaaaaccacagggatgaaatcatgtctgaggttctggcagaggagatcactctgaacgaaactgatggttatgtaaaagaatggagcattaacaaagagaatgtagttcttggtgtaacaccagaaagtaggaggaaaaagaaatgatagataagcagttcaaaaaagaggcttttaaagaaagcgtaaaagaaaatgtaaaatttctgtatcgcaaaacccttgaagaggcgactcaggaacagatttttcaggcagtcagctatacagtaaaggatgttatcattgacaactggcttgagacacagaatgcatatcagaaacaggatccgaagatcgtatactatatgtccatggagttccttatgggccgcgctctgggcaacaatcttctgaacctgacagcctatggcgaggtaaaggaagctcttgaggaactgggtcttgatctcaatgtaattgaagatcaggagccggatccggctcttggaaacggcggtcttggacgtctggcagcctgcttcctggattctcttgcaactctgaattactgtgcctatggctgcggtatccgttaccgttacggtatgttcaagcaggagatcaaggatggtttccagcttgaggttccggataactggctgaaaaatggttatccttttgaactgcgccgtccggaatatgccaaggaggttcactttggcggatatgtccgtgtggaatatgacccagcaaccggatcaaacagatttatccatgagggatatcaggcagtaaaggcagtgccttttgacatgccaatcctgggatataacaataagatcgtaaatactctccgcatctgggatgcagagccgatcgtagacttcggactggattcttttgacaagggtgattacaagaaagctgtagagcaggaaaaccttgcccgcaatatcgttgaggtgctttatcctaacgacaaccatatggcaggtaaggagctgcgtctgaaacagcagtacttctttgtttccgcaagtcttcaggctgcaatcgagaagtacaagaaaaatcacagcgatatccgtaagctgtatgaaaaagttgtattccagatgaacgatactcatcctacagtagctgttgcagagctgatgcgtatccttatggatgaggaaggtctcggatgggacgaggcatgggaggttacaacaaaatgtgttgcgtacaccaatcataccattatgtccgaagcgctggaaaaatggcctatcgagctgttctccagactgcttccccgtgtatatcagatcattgaggagatcaaccgcagatttatccttgagatccaggcaaaatatccgggcaactatgagaagatcaagaaaatggccattatttatgacggccaggtaaaaatggctcatcttgccattgttgcaggattttctgtaaacggtgttgccagactgcatacagagatcctgaaaaatcaggaactgaaggatttctatgagatgatgccggaaaaattcaacaataagacaaacggtatcacacagagacgtttccttcttcacggaaaccagcttctggcagactgggtaacagatcatatcggtccggactggatcacagatctttctcagatcagcaagctgaagccttatgtggatgatgagagagcgcagcaggagtttatgaacatcaaataccagaacaaggttcgccttgcaaaatatattctggagcacaatggcgttgaggtagatcctcattccatctttgacgttcaggttaagagacttcatgaatacaaacgtcagcttctgaatatcctgcatgtgatttatctttatgataaaatcaaaagaaatccgggtatggaattctatccgagaacctttattttcggagcaaaggcatcagcaggctacgctcgtgcgaaaaagatcatcaaactgatcaattcagttgcggatgttgtaaataatgataaatccattgacaacaagatcaaagttgtatttattgaaaattaccgtgtatccaatgcagaaatgatttttgcagcagcagatgtttccgagcagatttctactgcaagtaaagaagcttccggtacaggaaacatgaagttcatgctgaacggagctcctacaatcggaaccatggacggcgccaatgtggagattgttgaggaagtaggcgaagagaatgcatttatctttggcctcagctctgacgaggtaatcaattatgagaataatggcggctatgatccgaatgtgatctacaatacagacggtgagatccgccaggtgcttatggaactgatcaacggaaccttctctcatgatacagagctgttcagagatctgtatgattctctgcttcgcggaaacggctatgacaaagctgaccagtactttatcctggctgacttcagagcctatgcagcagctcaggaaaaagtggaagaggcttacagagatgaaaaacgctgggctcgaatggcaatgatgaacactgcctgcagcggaaaatttacttctgaccgcactattcaggagtatgtagatgatatgtggcatctggacaaagtaattattaaataataatatttcgtttatttacaggcagtctgcttttcatagcaggctgcctgtagtgtttacagaattgttgtgtaaacggaactgctgtggcgtcattccggtgtgcttttcaaaagacgggtcaggcttatttccatagaaacagttttgggagagtctgatttccgagatatgatctgtgggaataaaatgttttttgtgtgtcataagatatgtggagaaagtcccggaggataaaggtatgacatatttatggggcggaatgatacttattggcgttttgtacggcgcttttgcaggaaatcttcaggctgtgacagaagcagttgtttcttcatcaggggaggcggtgagtctttgtattacaatggcaggaattacggccatgtggacaggtatcatgaaaattgcggaaaatgccgggctggtgtcgcagcttgcaggcaggatgagacctgttcttaaatttttgtttcccggtctggaaccggattccccggcctgtcattatatttctctgaattttttatcaaatctttttgggatttcctgggcaagcaccagcgcaggactaaaagcaatggaggaactggaccgtctgaataaggaggagtgcagaaggtatggaaaaacaggaagacgcagtccacgtacagcaagttctgccatgtgtacctttatgatcataaacgtttcttctcttcagctgatcccgctaaatatgatcgcatacagaacaaaatacggaagcgctgatccggctgctattgtcggcccggccatactggctacagcagtgagtacggcggtggcggtggtgttctgtaagatcatggacggaaaaaggggatgaattgagctgtctttaaattctgttctgctattttgaggtctgaaatatcactattaaaaaaacttagagagctagtaaaataatcaattttactaataatatatgattctatataatgagactgtgcaaaataactgataataacggagaaaagcaggattcttctgttaaaaacacagaacgaaaagcgaggagtgaaaaagatgaaatgctttgatgtggcagtgatcggagcaggtgttgtgggatgtgcagtggcaagggaattgtccaggtacagcttaagcatctgtgtcctggaaaaggaactggatgttgcctgcggaaattcaggcagaaatacaggaatgcttcatgcgggttttacctacaggccgggctctctgaaagcggagtgtgctgtggagggaaaccgggagtttgaccaggtggcagaggagctggatattccatttaaaagaacaggcaagctggtagttggctttgatgaaaaggatcgaaaaaatattctgaaatacaaggtcatcggcgaggaaaacggtgtcaggggcatggaaatgatcgacaaaaagcgccttaatgagatcgatcccaacgcaggcggcgagtttgccatgtatgtgccgtcctccggaattcttgatcctatgcagtataccattgccctggcggaaaatgcctgcatgaacggtgcggaatttctttttgatcacagggtcttggaaattgagcgcagggatgaacgctatattattcatacaccggcagaggatgtttccgtcaggtgggtgtttaactgcgcaggaatgtatgcttcgcagatttctgaaatgctggggtatccgaactatccggttaaaggatttaagggagaatattatgttcttgacaaaaaagccggaaaagaaatgaaaattcccatttatccggctccaaatgataaaggaggattttccacccatgcaacgcctactgtagacgggaatgttctggtaggtccggattcctatgtggtagaggagtctgaggattataaggtgacgaaggagcacatggacggactttttgaggacggccggaaggtgtttaaagaaatgaagcgggaatattttatccgcaatttttccggaatccgatggaaacgttatgatccggaaacaggcgcaattcttgattttatgctggaagcagatgaaaaaaatccctgtacggtaaatcttgtgggaattgaatcaccgggaatcacctgcgccctgcctcttgcaagaagggctgtggcaaagctggtggaaaaagagcatccggctgtaaacgaaagctttaatccccgaagaaagggtattcgccgttttctggatatgtcccttgaggaaaaagagcaggctgtgaaggagaaccctgattatggggaagtgatctgccgctgcgaaacagttacaagggcggaaattcttcaggctgtccataatcctctgggagtctgtacagtaaccggaatcaaaaaccgtacccgggctactatgggacggtgccagggaggttactgtgaaacaagaattacagatctgatacagaaggagattggaatttcagaagatcagattcgttattccagaaaaaattcgtacatgtttacgggaaaggtgagggatgaaaaatgagacaggcagacgcagtgatcatcggcggcggtccggcagggcttgcggcagccgtagagctttatcataaaggaattaccgatatcctgattctggaaagagaaagcagtctgggcgggattctgaagcagtgcattcatgacggcttcgggctcagccgcttcggggaaaccttaagcggatcggagtatgcacagcgctttatcgatcaggtggaggagctgaaaattccctatattacagacgctaccgtaatccggcttaccggtgataaaaaggtatatgctgcatccagagaggggatcattgagatacaggcaaaagccgtgatgctggcaatgggctgccgggaaagaacccggggagctatcagcattccgggagaacgtcctgcaggcgtgtggacagcaggcgttgcccagtcctatatcaatcttcagaataaaatggtcggacgggaggttgtgatcctgggttccggcgatatcggaatgatcatggcaaggagaatgactctggagggggctcatgtgcaggctgtgtttgagcttcagccttatgcaagcggacttcccagaaatattgagcagtgtctgagagattatgacattcctctttatctgagccatacggtaacagatattctgggcaaagaccgcctggagggggttgtggtttcccaggtagatgagaagcttcagcctgttcccggaacggaaaaaacataccattgtgatactttgattctttcggtagggctgattcctgagaatgagctttctcttgaagcaggcgttactctggatgatcgaagtaagggtgctgttgtggatgaaaactaccagacagatgtggaagggatttttgcagcaggaaatgtacttcatgttcatgatctggtggattttgtgtctatggaggcagaaaagctggcagacgccatggcccggtatatccgtgaaggcggacttcctccctgtgagcttgatataaaaacagacggaaacgtaactcacaccattccccagaaggtcagcggcaaaaaatccttccgtcttgccatgcgtgtgcgccgtccgatgaaggatggagctattgaaattactcaggatggaaaaactgtaaaacgctataaatttaaaaaagctcttccggctgaaatgatccagattcctgttgaggcggaaaagctaaacggagaagctcctttggaggtgaatgtgatatgctgagacagtttacctgtattatgtgccctatgggctgttctctggaggcagaggttctccctgagggacgggtggaaaaagttaccgggaacaactgtaaaagaggaaaggaatacgctgtccgcgaggtgacaaatcctgtgagaaatattgcctcctctgttctggttgagaatggagagctgcctctggccagtgtgcgtcttaatgccccgattcccaaaaaggatatttttcctgtgatggcggagatcagaaagataaaagttacggcacctgtttccattggccagatcgtgcttcaggatgtactgggaaccggctctgacgtaattattacaaaaaacgtaaagagaaaggcggaagagctatgaaggtagtaaagggaggaaccgtctcaaggcttctgaaggatgttcctgttccggaaatgtttcatgcaaggcagacctttccccgtgaggtaattgctccgaaggatattccagcagttgttttccgggaaatggcacagcctcagtttgcggaaaagatcaaaccgggaatgagtattgctgttactgcaggaagccgcggaatccggaatgtggatattatcacaaaagcagtagttgattttgtaaagcaaaaaggcgcatctccttttattgtaccggcaatgggaagtcacggaggagctacggcagaggggcaggttgagattctggaaagcttcggaatcacagaaaaaacaatgggatgtcctatccgttcttctatggaggttgtggagctgggctattccagtctgggacgcagagttgttatagacaaaaatgcctatgaatcagacgggatcattgtttcctgcaggctgaagccccacaatgctttccggggaacccacgaaagcggtccctgcaaaatgatgaccgtaggacttggcaagcaggtgggggcccaggtggtccacagtgacggaatgggtaaaatagctcagaatattcccacgatggccgcagttgtccttgaaaaagcgcctgttctttttgccattccctgcattgagaatgcttatgatgaaacctgtaagatcgaggcaattctgccggagaatattctggagagagaggcggagcttctgaaatatgcgttttccaatatgccgaaactgatcgtaggcgaaggggacgtgctggttgtggacaagatcggaaagaacttcagcggtaccggagtggatccaaatattacaggaaccttttccacagagtttgcaaagggtggtattcaggttcagagaacctgctttttgaatctcagcaaggagtcccatggaaacgctctgggctgtggtcttgcaagcgctattacaaacaagatttttgaggaaatggatattgaaaaaatgtatccaaactgccttacaagtacagtactggcttctgcccgtattccttgtgtgacggcaacggacagggaggcgatccagctgtgcatctgtacctgtaacggacttggagatgcacctgtacgcatggtgagaattgccaacagtcttcatattgacaccattatgctgtcaaaggcttactatgatgatgtgaaagccgggaagtatccgggagtggaggctctggatgagcctgcgccgttggagtttgacgaggaggacaatgtggttacaccggtgaggatttaatgcttgaccggtctcccgggatgtgatatcatacctttcagattaaataaaagaaacgatccctctgccaccgggtaagaggataaagacgtcagttttttcgccgtaggtcttagaaagcgaaaatactggcgtttttgttttgccggacaggtgtgttggaaacagggggaaataaaaaacaacaggagggaatatgaaaaaaacatcatgtctgggagaatttatgcgatataccagcctgaatgttctgggaatgatcgggctgtcctgttatattctggcagataccttttttattgccagaggactgggctctgacggtctggctgccctgaatattgccattcccgtgtacagctttgtacatggctgcggtatgatgctgggaatgggaggagccacaaaatactctattttccgggggcagaaaatggaacaggagggcaacaggatctttacgaataccgcgtatctggttgggatctttgccttgatctttgtccttatgggacttggcttttccggaaatatcacgtctcttcttggcgctgacggggatatttttgaaatgacaaaaacatatcttatggtagttcttctgtttgcacctgcttttatgacaaatgattttcttttatgttttgtccgtaacgatgggaatccgggacttgcaatgacagcgatgctgacaggaagctttgcaaacatcatactggattatgtgtttatttttccaatgaaaatgggaattttcggtgctgtttttgccacaggactggctcctgtgatcagtgtcggcgtgctgtcgaaacactggataagcagaaaaaataacttccatttcagtcctgcaaagccggatatcagattaacgggaaccaccttttcactgggtataccatcccttatttcagagctggcttccggtattgtgattattgtatttaactttattattctgggaatccggggaaatctgggtgtggctgcctatggagtggtaacaaatatatctcttgtggtaacatccatgtttaccggaatcgctcagggaatgcagcctattgccagccgctcttacggaagcggagatgcggaaaatacaggaaaaatatttcgttatgccgttataacccttctgggaacagcagcggtaatctacggaatcgtgttcctgtttgcatcgccgatcacatctgtctttaacagcgaaaacgatatgcagcttcagaagattgcggaagaggggctgaagctttacttcctggctgtgccatttgtgggctttaatattgtttcggccatgttttttacctctacggaacgggcgtttccggctcagatgatctctgttctgagaggtttggttgtcatcattcctgctgcctttattctttcagcagtgtttgaaatgcagggcgtgtggctgtcctaccctgtaacagagggaatagtgacaatatttgcagtatgtgttctgttaaagagtgcaggaaggaaaccaggtacagaaaaagcctgaatatttatatggaaatgacctgtcccatggaaacatgagaaggtaaagaagagattgatttactgtttcttttccagattcagaaaaatattacagataaaaaacttcccggaggcaggtgatttccgggaagttttatttatagttatgagcttaaacgacagaacagagaaagtcaggaagggtcatccggagagaattcaagaatatctcccggctggcagtcaagctccctgcatatggcattcagggtggaaaagcgtattgcacgaacctttccggttttcagattggaaagattaacgttggagatgcctacccgttctgccagctcgttcagagaaattttccggtctgccatcacccggtcaagtcttaaaataattgccatttttccatctccttatattgtcatatcagcttcatcctgaagatcaataccataccggaaaatttctgaaaggatcagggcaaggattcccattaccaaaatttcaccgctgatatccggaaagcggaaaaagacagaatcgaagagaaacttttcgatcaggctgtaatacaaagtatttttaaacagagccatgatgatcagaatccatgaaatgacccgcagatctttttccgtttttcgagtaaatggtgtgtgttccttcagggttctgtccaggatccgttttacaaaaagaagaacgatcataacaggaagaagggtcaggatactttcaagaataccataaatcagatagccattcagaggatctgcgatctggcctgatagatcagagggcagggagaatcctgtacaccatgcatctgaccaggtaaaaaactggtgataattgtctgtatattcataatggaagggaaccagtcctgcttttgccagaacagggagcaggattaaataaaacatagccaaaagaagaagcagcaaaatacctttcagaaaaacagcggcatattgacaggtggctaaggacttgtttttcagtgacagggaggatttttctgaaaaaattattttattcatagaagccagctcctttcttttaccatataagatttaatgtttatcgttgatttcaatatatcaaagtgacttgtaaatgtcaataaaaatttatcgtttatcattaaaaatatcttctggaatcttggcatacataaaaagaggacatatttcataaggtatcataaacagaaaaactggagaatttatgaagtttatttcctatatttccgggtttatgataccgtttcttttattttatgtggtgggatacgggcttctttctaaaagagatatatacagtgactttctggaaggtgcaaaagaggggctgaaaacagtaaaaggtctggttccggtgctggtcggtcttatgactgcagtaggcgttctcagagcctccggcttccttgattttctgggggaaatactgggaaaggcaacgtctgcggcaggtattccgccgcagatcgttcctcttggaattgtaagaatgttttcgtccagcgcagccacgggactgcttctggatatttttaaagaatttgggacagattctcctgtggggctgatggctggtctgatgctcagctccacagaaagtgtgttttactgcatgagcgtgtattttggctctgtgggtatacagaaaacaagatatactcttgcaggcgcacttgttgctacgcttgccgggatggcagcttccgtgtggatcgtgacatgtgtgatgtaattatcggacaacaaataagagggattgaattacctgaaaaagtgaaatataatgaatactatagaattctgaagggagaatgaagatgcagcattatattacagaaattaaaattaatcagctgcggcatttatcagatatatcaatttcattaaatacagaaaacagacagcacttgattattacgggtaaaaatggttcgggaaagacctccctgctacttgcggttcaaaagtatttgcaggctattaatgacggaaaattaaacaggttaaatgatatttatattccccaaagcttggaattggaggaaagcctgaaggcgatacagacagaaaaagaaaaatatgaaataaaacaacaatacaatctggggatggatttgataaaaaaatacagagatggtgtagatatccgctttaatgaatctgaagatctggatgcgctgtacagtcagggggaatttgtgacagcattctttccggcaaacagaaaaacagaaatccttcgctctcggggtgtggaggatattaaactgaatgaagcttacagcataaattcagagccgggaaagctgttgcacaaatatatggttcatctgaaaacacaacagtcttatgccagaaacgaaggagatctggaaaatgcggaaagaatccaggcctggtttgatcgctttgtagatgcgctgaaaaccttactggatgctccctcaattacgctggagtataattacaaagaatatgattttaaaatttgtgagaagggaagaacgccgtttggtctggatgaattgtcagatggatattcttctgtaattcatatagtttcagatcttatgttaagaatggataagaactggattctgggaaataaactcagtagttatgatgcagagggaattgtgctgatcgatgaactggaaactcatcttcatatagaattgcagagaaaaattttgccatttctcataaaattctttccgaggattcagtttattgttacaacacattctccgtacattcttaactcagtttcgaatgctaaagcttatgatctggaacgctgtattgaaatggaagatttgtcatcctattctgcagagggactggcagagggatattttgatgcggatgagtattctgataaactgagagaaaggatttgcagatatcagtatctgaaacaaaaggaagaactcactgatgatgagagggcagaacgggcaaagttgcgtattgagcttaaaaatattccccgtggcttgtccggtgaagcaagagagcggtttgaagagattgaaggaaatggtttatgataaaaattaaacgcagaaaaacagataaaacaataaaagccattgaagctcttaagactgcaaaaattaaaaacagttcttataatactccggaggttaatgcggccctgcgggaaatgttttatggaaaatgctatatctgtgaaaataagcaaactacgtcgtttcagatagagcatttaatgccccatcatggaaatgtagatttaaaatatgattggaacaatcttttctggtcctgtgcacattgtaataacattaagaacgataagtatactcctattttggattgcacaaaagaaaacatagaagattttattgcttttcgtaaaaaaggatattttggaacagaagagagactgatatttgaaagtctggattttcgtacagagacggagaatacggtaaaactgcttcaggaagtgtattatggttcaactcctcaaaaacagatagaggcaaaggtgttaagacgggcactgagaaaagagctttctgagttcaaagaatatgttcgggaatatcaggaagaagaggatgagcaggaaaaaggggatttgagatgtctcttaagaaaggaactgagggacagctcttcctttgcggcatttaaacgctggctgatcagagacaataaaaatattttcccggaattatatgaggatataactgcattacataaaaattaaatgaacagatataaaatatggcataaaacaaagacaccctctgcggaatgatgtatatgaaatactaacaaacaatatactcattcaaacaggagggtgtttgctgtaactggttcccggtagcagacttaaacggtcttaactaaaaagctcccgggttttctgcatccattcaatgacaggtacggagaaggggcatctttcctcacagccgccgcattccaggcagtgggaggcattggcgtccagtgcttcatagtgggcgcggactgtggggggaacctccttctgcatccgcgccagatccgcaagcttgttcaccatggcaatgtcgattccggcagggcagggagcgcagtgaccgcagtaggtacactgtcctgccgcgtaggcatgctggggagcgtttgcaagtacgcttgcataatctttttcctcatctgtggcggtctcataggcaactgcctgatatacgtgttcaggtgaatcgaaaccggccataacgcttgccacagccgggcgggtcagcgcatagtggaggcactggacaggtgtaagcgcaacgccgaagggagaggtttttgcatcaaaaagtcttccccctgcatagcccttcataacagtgattcccacatttccctgttcgcagatacggtaaagctcttctctttccggatcaatacggttcaggccgtccgcgtatttttccacaaaataatcgtccagattttcacttggaggcagaaggtcaaaggccgggttgatgctgaacagaatcatttcaatttcgccatgaagagcggctgtttttgccactgtgggattgtgggtactcattccgatgtggcggatagttccggcttctttcaggttccggacataggcaataaattcgccggacatgatctctttaaattcctcagggctgtcaacaaagtggatcatgcccagatcaatataatcagtctgcattcttgtaagaagatcccggaaagcttcatcaaccttgtccagatctctggtacgttcatactggccgttctgccaggtggaaccaatatgtccctgaatgatccatttgtccctgcagtctttgatggcatttccgatattggagcggacatttggctcggacatccagcagtccaggatgttgatgccctctttctgacagacgtcaatgatctcttttacctcttctgtgttgtggcgttccagccattcgcctccgagaccgatctcactgacattgagacctgtttttccaagtgtacggtacttcataatgttttcctcctttaaaaataatgcggctccggaaaaatcagcttttcagaggattttgtccggaccgcatgtaatgaacagcttatacaagctctttatttttcttaattgtttccagaataatgttctgggtgtattctccaagatgtctctggtcattcttgtccagatcctttacataaacgggcttgcagtattccacgatcacatgacagggcttgatcttcggaaaatgtgcctcaaagatttctgccgtattgttcatggcaatggggataatgggacagcctgatttggaggcaatcttaaagcttccctcatggaagggaagaagctctgtttcgtcctctgccttatttctggtgccttccgggaaaatacagatggaaattcctgactttaccttttcaatggcagtgaggatggttttcagcccctgcttgatatccttacggtcaagaaacaggcagtgcagatatttcatccagtttgacagaagcggaatcttttccatttctttttttgccacatagccggtgcggataggacagcggctgtaggtgagaagaatgtcaaaatagcttctgtgattgccgatgtaaagcacaggagtatcttttgggacattttcttcgccgatcacagtgatctttgttccggcaacccacagaataaatttaaaagcgccctggatcagccggagagaactgatttcttttgtcatgggagagaatttgccgatgatccattccacaataagaacgggaatggaaagaatcagaaatccgatcacaatgacagcaacaagtaaaaagcgaatcataatcgtacctctttcgtatacggcagcccatatcatgtgcggctgccttaatagtaacattatacaaattaaatgaaattgttgcaataaatcttttggcaattacatacaatacttatcaaggaacggattggggtggcattatgaaaaagacagtccttctggtctgttatctgattctgattctgtctctgggaggctgccggctggtgcgcatcgaggaagaaaaaagaacgcctcttgagtatgaggtggtggaaccggaacagcttcctgaggaagcggcttcacttgtggaagaaaaaaaggcttcagagttcagggtcacatatcagagcggaaaagagctttatctgatcagaggctacggaaaacagatgagcggcggatacagcattcaggtaaaagagctttcagcttcttccacagctgtattttttgagacaaagctgatgggtccctctgcagaagaacagagcggagcgccgtcctatccgtatatagcagtaaaaatacagtaccggaaggaaccggtacagtttcaataatgacaggaggaaaagaaaagtggaattaaaaaaagaagatattcagacgctgcgggtaaaaagccgggcaaccagtcaggtaacctttgatgctgattacaatgttccggatgtcaagccggatatcggacgaatgatccagaataaaggagaggtggaggtggaggaggtccgtttaaatgacgggcacgcttttgtccgcggaagcctcaatgtagatcttctttatgtgggggaagaggaaggaagagtgtacagtctttctgcgaagcttcctgtggaagagacactgaatctggagggaattgtaagcggagataaaatgtgcctgaaatgggagatcgaggatctgagtcttcatctgatccattccagaaagctgaacataaaggcagtagtgacattttatgcagttgtggatgagctggcaggaatccgtctgcctgtggctgtggacgatgaaactgtttccgtaaaaaagaagcccatgaagcttttaagtcttgccgtacataaaaaggacactctgcgcaaaaaggaggagattgttttatcctccaataagcccaatgtagcagagcttttgtggcacactgcagaagtccggggccttgatcttcggcctgaagaggacagagtaaaggcaaagggagagctgtatgtatttgttctttataccggagacgatgagggaaggacgcaccagtggctggaatattcggttccgttttccggggaggtggagtgtccgggatgtacggcagatatgatccccaatatggaggctgccgtgatcagccagtcagtggaggtgaagccggattctgacggggaggaacggcttctgatcgcagatatggtactggaagtggatatgaagctttaccgggaggaagagcatgaggtggtcctggatgtatatacgcctttgcgccagtgtattccaaaaggaaaaacagaggctctggaaagtctgctgatccggaatttttccaagtgcaggctgtccgacaggatcgaaatgaaggaaaccagagggaagatccttcagatctgtcacagccagggacaggtgaaggtggataaaacaaggattgtagagggcggcgtgcaggtagacggtattgttcagcttaaaatcctttatattgtgggaaatgacgatatgccgttttattccatggagaccatgattccctttactcagacggtggaagcaggcggaatcacagagcagagtgtgtattatcttcatgcagatctggaacagcttgccacttccatggtggacagtgatgaaatagagatcagggcaactgtgagcctgaatcttcttgttatgagctgccaggaaacaatggtcatagataaggtggaggagcagcctctggatgaggaaaaggtgcgggcaatgccgggaattactgtttatgtggtaaaaccggaagactctctctgggatatcgcaaagaaattttatactacagtggaggagatcagtacagtcaatgaactgaaggacggagagatctctgtggggcagcctctgctccttataaaaaaagtggaacaatgactattgaaattcctgtaaaaatcatataaaatatttgcaaagaattgtatacaaagtacagaaaaaaaacgctgctgtccacagcttttacggcagtgcataataaaaagtataaaagataaagtacgaaaggacagaggaatggcttatgcgtcttagggcaatggcaaaaatcaatcttggacttgatgtgatccgcaaaagggaggacggatatcatgaggtgcgcatgatcatgcagactgtgcgtatgtatgatactctggagatcaggaaaaaacaggcaccgggaatttccctgcgctccaacctgccctatgttccgtcagacgagagaaatcttgtctataaggctgcaaagattcttatggatgaatttcatgtggaagaggggctttccatgaagcttaccaaatccattcccgtagcagcaggaatggcaggaggaagttcggatgcagccgcagcctttgtgggagtgaaccgtctgttccgtctgggtctcagccaggaggagcttatgaaaagggctgttcaggtaggggcagacgtaccttactgtgtgatgagaggcactgccctggcagaggggatcggtgaaaaattaacgcctctgccgccaatgccggagtgctatgtgctgatcggaaaaccgggcatcaatgtttccacaaaaacagcatatgaaaatctgaggctggacgccattcagagacggccggatattgacggaatgatcgcggctatccgaaaccaggatctgcgctccataacagaaaaaatggagaatgtatttgagccgggaattatggaaaaatatccggtgatcggcgagattgagaaatttatggaagaaagaggagcgctgaaggcaatgatgagcggaagcggccctactgtatttggtatttttgaggacagagaaaaaatgtttgccgcatcagaggctctgaaaaagagcggtctggcaaaaacagtttttgcttcacggatctataaccgttctgagtaagcgcgcaattcagatattccggagacatcagtgataaggaggaaatacaaaggatgaatgatttttctgttgatatgaatgagtatctgccgttgagagacgttgtatttaatactttgcgcaaggcaattctcaagggagagctgaagccgggagaaagactgatggagatcgctctggcagaccgtctgggagtcagcagaactccggtccgtgaagccatgcggaagctggaactggaaggtcttgtggtgatgatccccagaagaggcgctcaggttgcaaatattacagaaaaggatctcaatgatgttctggaggttcgcattgcccttgaaaatctttccatagaaaaagcctgcgcccgtatgacggaagagcagttagcccagctgtgggatgccgcggaggagtttgaaaaaacaatggctgagggaaatctggtaaagcttgcagaggcagacgtggcctttcatgaggtgatctaccagtcttcagacaaccgccgtctgaaccaggtgctgaacaatctccgggagcagatttacagatatcgtgtagagtatctgaaggatgaagagacaaggaatcttctggttaaggaacacaaggagctttatgaggcgatacgggcaagagatgtaaaaaaagcccaggagatctctttccgccatatagaaaatcagagagaggccattgtatgctctatccgggaggagacggaaatcagggaaaaggcatccgatcgtaaataaaactgaaaaatatggttattctaagagaggtacaaatggtatctctctttttatttaccatgatttagagagttggaagaggaagtgtcctcttttttgcagacgatgtagcaggagttgtatatgggaaaaacaaaaatttcttccaggctgaaggacaatgaagcatatataagagagcgctgtaaaaactgcgcggatattttgatccgccccatgcgtattggaactatgggaaaaacagactgtctgatggtatatattgaggtggcagtttccaatatgatgctggatgattcggctattggaaaaatgattaaccatttctgggaaagctcaccggaacagattcaggagtttatgagaaacaacagtctgggaatcgcagatgtaaaaaaatttgaatacatggaagatgccgtggcggctatgcttgcaggaaacgccattttttttatggacggttatgaccgggcaatgaaaatttccagtaagggctatccaaatatgggagtgtcgggagcagaaacagaaaaggttctccggggttccagagaaggattttccgattctgtaaaaacaaactccgcccttgtgaggaaacggcttcgggatacaagaatgaaagtagaggaaatgagcatcggagtccgttccaatactgtgctccagcttctttatattgaagatctggttcaccaggagcttctgcaggccatcaaagaccgtctggaggaatttgagattgatgggatcctggacagcggaatgctggagcagcttaccgaggaagcctggtattcgccctttcctcagtatcagacaacagaacggccggaccgggcggctcaggagcttcttaacggaaaagtcgtagtgatctgtgacaatacgccttatgccctgattcttccaagctcctttaacggatttatggaaagcagcgaggactggtatcaccactttgaaatggcgtcgtttttaaggattctgcgctatctggcgctgatgactgcggtgcttcttcccgggctttatctggcagtgatacggtttcacactcagattcttcccacaaaccttttactgtcttttgcagaggccagggagggagtgcccttttcaagtgttgtggagcttgtgtttctggaactgtcctttgaacttataagggaggcaggcgtccgcgttcccggttctctgggaaatgccattggaatcgtaggaggtctgatcatcggacaggcggctgtcagcgcaaatctggtaagtccgattgttgtgatgatcgtagcccttacggccctagggggaatggtgattccaaatgaggagtttgcctctgctttccggcttctgaaatatgtttttctgtttctgggaggatatctggggatctttggcattgtgctgggaatctacctgacggcagctcatctgtcaggactgttaagctttggaattccctatcttctgccttttgtaaaaaaatctcccataaaggatgttggggatgggattctgaggcttcccttccgtaagcgccggatccgccctctttatgccagacaggaacagagtctgaggctgaaaaggagggaaaaatcatgaaatttgcagaaaataacagaatttcgcaccgacagctgtaccggcagatggttctggcgtttctggctccttttcttctgtgtcttcccggagaaaaccgcgtcacagggatatcagggattgtgggagtggcggctgctctggtgcttctggtgatctacagcttttttctgagaagactgacgccctggtacacggatccgattaaaacctttggagccgcaggcggcaggatcataggagtgttttttctgagctatgtggcgctgacaggcgcatatcttctggatttgatggatgagctggttccggctgttctgatcaccggtattccgggaattgtgatttcttttctggcggcagcggtctgcagctttggaacccataaaggtatgcagagaagaggaagaatggcagaggtgtcaggcggacttcttctgggcggagttttactgatgatggttctctgtctgtggcagatcacgccggaatattttacagaaatgacagaagcttctgttctgcagggaaaagaggttttaaaaagctgttatggaatccttgcagcattttccggaatcgggcttctgccctttcttttgaaggatgtagaaaaaagaggaactgcaggaaagcctgtggtcctcggaattgttactctgggagggatcctgatgggaatgcttgtactgatcccgtcagtgcttggatggcagagattcagaaatgaagcatatccggttcttccccttctggcaggggcagatcttccgggaaatgtactggcaagatttgatgtactgtggatgggatttcttttatacagtcttctgtttgccctgggcagtctgttccattacggacacaggatcctcgaccggacccgtatgggaagcgggaaactgtggctgcctgcagtgatcttcgggctgtccctgataaaatttcaggggacgggaatccggcaaatctttgacttttatctgagccgcatctttgttcccggtctgcttctgatccaggtgtttatggcgctgagaggaaaacgcaggcgacagaaaaaagtagcgctggcagccggcctctgcttcgtggtgtttttcagcggatgtgcagccatagagccggaaaaaagaatgtatcctcttgcactgggagtaaacagtgaagaatcagagttttctcttatttatggaatgccggatcttcctcaggctaccgggcaggagaaacaggaggagtcaggaagtgaggctgtgctttctataacaggaagtgatttttatgaaatagaaaggatctatgaccgctctcaggaaaaatatctggatatgagccatctgcaggtgatcattatgggagacagacttctggaaggggaaggctggaaaatatttatggaatatcttaaggaagagccctttgttggtgaaaatgtttatattttccggacagaagacccggaagcagtgctatcacgggaaagcggaggaacctctgcgggagaatatcttaccgggcttctggaaaaccgtctgccgtcccagcagaaagacggggtgacattaaggcaggcttatcatcagtggtatgagagcggcgctcttgtggaaattccacgtatcattatggaaaacggagaattgcaggtatatctggaaaagagctgagaacctttaaaaacaggtatcttaccggaatagaaagccgtaaattgtctatactctgaatagtgaattctggtcagaggttcacagatgataatgctgtggacaggaacaattttggaggtacagactaatggaatggttaagagacagaaaaaaccgtctgacggtttcaatacttgctgcaatggctgctgcgattctggtggcaggaggattcaggctgccacagtatccggctgcatctgcatggtggggaaccatgtatccggaattttgcttttcggagggaagcggagacagcccccgaaagatttccttctggcttgcggaagtgctggaatggtgatatgatataaaaaccagagactgcggaaaagctccgcagtcctaccagtgcagaaacggagacttatatttatgaagccagacagagacgcgcccataggtgtatttgattccggagtgggcgggctgacagtggcccgtgagatcatgcggaatctgccgtcagaaaaaatcgtatattttggagatacagccagagtaccctatggaggaaagtccagagagaatattatccggtattccagacagatcattcattttcttatggagcagcaggtcaaggcaattgtgatcgcctgcaatacggcaagcgcttttgccctggaggcagtgagggatgaatttgatgttccgatcctgggcgttatagagcccggagccagagtggctgcagcggagacaaagaacaaaagagtaggtgtgatcggtacagtaggaactgttgacagcggcattcatgcatcttatctgaaaaagctggatccggagatcacggtgatcggcaaagcctgtcctctgtttgttcctctggtggaagaaggatggcttcacgatccggtcactgcagaggtcacggccagataccttcaggaatttaaagataaagatgtggatacactgatcctgggctgtacccattatccgcttatccggtctgtgatccgggaatttatgggggaggaagtacggctggtcaatccggcttacgagacagccctggagcttcgttctcttcttgaaaaaaaagagctccttaatacaggagggaaaacagaagaatttccatatcgtttttatgtcagtgaccttgcggagaagttccgggcatttgcaggctcgattcttccctatgatgtggaaatgacaaaaaagatcgacattgaaaaatattaggaggcatttatggataaaaatgtactcatacatgtgcggggacttcagatgatggaagtgggagaggaacaggagcccatagagcttgttgtacccggccagtattattttcgcaacggaagccattatctcagatatgaggaaattctggatgaaggctcagaacctacgataaattacataaaaatgtcacctcagagcatggaggtcaggaaacagggcctggtcaatgtacatatggtatttgagcggggaaaaaagaatatgaccttttataccactccgttcggaacacttcagatggggattgttgccaccggaatggagctgaatgaaagtgacaataacattaatatgaaggttgattatgcccttgacatgaatgaagagcatgtggcggactgttacctttctgtgcaggctcagcctgccgattcaaaggattttgtactgtaaataaaatacaaggcagctgtaggaaatttcttacagctgccttgtgctttttaattttttttgctgaacattcttttaaagaagccttttttcttggccggcggagtatccagatgaccgcggataccgcgtacacctacaatgtacagaccgctgatatcagcttttacttctttttttacaggaatctgttcgtaaattttttcatctgctatcagaatagagatcttcggaccgatcttggccttgacgataggcagtttggtacgacgcatcatcttcggtgtctgatcgatcaccatctgcgggagaccagattcttttatgcgaagtcgttttttgtcaattaccaacatggaaacagtctgttttgcagcttcaatctgtgcctgctgttcttcctgttttttctgagccttttttccaaaaaaataaagggcaatcagtacgccaacgagaacaacaaggatgacaagcaggacgatggtaagtgtattcatagataccctcctcaatatgtatatttttccctcttataatcagatacaggcggacatacatgtccttcagagagaattcctgtcatgcgaagtatattttatcattaatccggttaaaaggcaaacagtttcgggcaaaattacagtaaaatcccgaatggagatccaggagaaactgtttagataaaaattataagaaattagtttatattaggggaaaacagtggaaattatacggataaaaagttataataagcaaagtgacataatttgacgatttttggcagctgttcacaggtaatatttcacaagatgtattgataaaaaaccgaaaaataaaggaaaaataccctcatcgaatgtaaattgcaggatactttgaccaggcttccgggaaaggagtgaacagtaaaatttcctgactgttgtgataccggaataaaggattttacattgggtatattaaaaattacagaaaaataatggacaggagttactatggaagagcgaggcaggggaaagagaaatatgcacagtgagaaaaataaggacgagaggaacaggcagctggaggccatgaccgaagaggaacgtgacgactatttccgtgagctgcgaagggagagaaggctgcgcaggcagaaaagggagcgctggaagaagctggcggttctgggcgccacagcagtgatttcctttgttgtagtagttggcgcagtcagcgggatcacacgttttgtcattacaaaaagcagcggttccggcacagcgtccaataaagatgaaaacaaaaaaggcgggggagaagcaacggcagaggcttctgcgcagacagaccttctggcagaggcgaatctgaaagcggcccagtatgattatggcggggctgtacagcttctcaaaagcgacagcagttatgacaagaatgcggattttcaggctgcagtaaaaaaatacgaggagacaaaggccacctgcgtttcctggcctctggaagaggtaactcatgttttttatcatacgctgatcaaggatccggcgaaatcatttgacggtgattataaagaaggggactacaatcaggttatgacgactatagatgagtttaataagatcactcagactatgtatgacaagggctatgttatggtcagcatcaaagatatggctattgctgacgaaaacggaaatataactccgggagaaatccttcttccgccgggaaaaattccgtttgtcctgtctcaagatgatgtgtgctattaccattacatggacggagacggctacgccacaaagcttgttgtggatgctgagggcaaggttcgcaatgaatatgtggaggatgacggaacagtttcagtaggtgactatgacatggtgccactgatcgaccggtttgtggagcagcatcctgatttttcctacaaaggagcaaagggaatcatagctctcacaggctataacggaatccttggctacagaacagatatcagctatgagacgcggccggatgatctggacgccaataaggtggagtggctggatgcccatccggagttcagcctggaaaaagagcgggaagaggcaaagaaggtggcagacgccatgaaggccaatggatggctgtttgcaagccatacctggggtcaccagaacgtaggacagattgacctggctcatctgcagacggataccgagaaatttaaagaaaatgtagatccgctgattggcggaacagatattattatttttgcttttggaacagatctgactgttcaggaagattattcgggagacaagtttgaatatctgaaaagcgcaggctataattatttctgtaatgtggactctagtaaatattttgtacagatcagggaccgctatctccgtcagggaagaagaaatctggacggatacagaatgtactataatccggagcttctggaggatctttttgacgcaaaggcagtatttgatcccagcagaccgactccggtaccgcctatgggataaagataaaaatatatcatccgccggatgagtgtgtccggcggatttatataccggtcagagggggccggaaggggaaacagaagaaaggggaaaatccagaaatgaaaaaagcagttctggcactgacgattgcggcagcagttgcggcaggcagcggaagtatgccggtttggaacgggaacacgcaggaaatcacatcaaagacatatatgccggtgtctgcatcaaaggataaaaagaaaacagaagagaagaaaacaaaaaataaaaacagttcacagtctgttctggagcaggcaaagatcatgtatgcccagtacaattatgacgaggccatcaagcttctgaaaagccagaaggactttgaaaaaaacaaagactatatggacatagccgcaaaatgccaggtggcaagggctgctctggtggaatatcccattgaaaagatcacccatgtgttttttcacactcttgtgaaagatacttccaaagcttttgacggagattctgattcaggcggttataatcaggttatgacaaccatagacgagttcaacaagatcattcagatcatgtatgacaagggctatgtaatggtaagtcctcacgatatggctacagtgaatgaggacggctccatgagccgcggaaagatcatgcttcccaaggggaagattccgtttgtactgtctcaggatgacgtgagctattatcattatatggatggggacggatatgcttcccgccttgttctggatgagaacggggaagtaaaaaacgaatatattgaggatgacggtacagtatcggtaggcaattatgatatggtgcctctgatcgatgaatttgtgaagcagcatcctgatttttcctatcacggacgaaaaggcattctggcaatgacaggatacaacggcgttctgggatatcggacagatatcgcttataagacaaaggagaatcttcaggataatcagagagaatttctggaaaaaaatcctgattttgattatgaggcagacgtggcagcagccaaaaaggttgccgatgccatgaaagccaacggatgggagtttgcaagccatacctggggacacaagaacgcaacggattcctctgctgaggaactgaaggcagacaatgagaaatgggaggcttatgtggctccgattcttggaaaaacagatacgatcatctttgcattcggggctgatatcggcggctgggagggatactcttctgacaatccgaaattccagtattataagagcagaggctatcattattactgcaatgtagactccagccagtactttgtacagctttccgaccagtatcttcgccagggaagaagaaatctggacggataccggatgtattataacccggaaatgctcagcgatctgtttgacgtatcggaagtatgggattcttccagacctactccggtacctgaaatgtgacagaataaatgaatataaggcatcagaaaggagcaacttatgaagaaaaaaacagttttggcaatgctggtaatgtgtatggtattcagtgcgtctgcctgctcagataagaatgcggaaaaacctgctgcggaaaaaacagaaagcagcgcggaaaagacagataaggcagaagataagacaaaatcagaagaagacaaaaaagaggaagaggaaaaagctgaggtcagacttgtttccgtcagtgatatttccaaatatattactgtaggcgaatataaagggctgaagcttaataatatcgtagaacctgtttctgatcctgaggtggatacagagattgaattccggctgcaggataaggcagaggaagtgaaggacgcaacagcccagtccggagaccaggtgagagtcagcttcaccggaactattgacggcaaaagcttcgagggcggctctgaagaagattatgattttgtgatcggagagggagctgtggcagacggctttgatgaaggaattgtcggcatgaaagccggagagacaaaggagctgaatctgactttcccggaagactactatgacagtgagcttgccggcaagtctgcagtatatcaggtgactgttcagagcatccgcagaactcctgagcttacagatgagtgggttgcagcaaatacagacagtaaaactgtggccgaatacagagcggctgttcagaaggagcttgaggatggtgtcaacgaagctgctgagaatcagctttatgcagatgcatggaaccaggtttttgaaagctctgagatcatagaatatcctgaagaagatattgagacagccatagaagcttataaagaactgaatggcgagtatattgagcaggcgcagatggatatgagcgaattcctgagatcacagggaattacagaagaagaatatgaggaagcctgcagagagtatgcagaagttaaggtaaagcagaatctgatcgttcagtatattatggatgaagaaaacctcagcgtagatgacaaagagctggataagaagcttcttcagcagtacggcgccacaaacctcagtgaagtggtagagctttacggggagcgggaagtgaatgagacacgggctcttctgagagtggagcagtttattgtggatcaggcggaagtagatgagaaagtaggcggcggcgatgagcttgcagaaaatgaagatgcagtaacagatgagggcgcttacgatactcagacagaggatgccggaaatgctacaggtgagcacgttgcggacgaggacgctgctttacaggaataactcaaagatcttcagacagaggcaggacaatgtctgcggtctgtatcgatccggaaaacggacagcaggatacactctgctgacaggtgaatttcaggaaactggatgattttagaaaagttttataaatatatggaaaatgcacggggagcgctattgtatttctgtaaaaaatgcagtatgatagacaggacaaacaaggacagattgatataatagcaggtgggaaacaatggataaaagagttttgcaggaaaggatgcgcaaaaagcagcagcagcttcgacgccgcaaaatgatgaagcttggcggttatgtactggctgtggtgctggtagtagtatttatcataaagggcgtgattttgcccgttgcaaataagatcagcggtaaggatgcagctgaacccgtgcaggtggcagcagatgctgataatacggaagatgagggaaagacagaaacaacaggaacaaaagaagaagtaaccacagacgaaacaaaggccatccggatgcctctggcaagtgtatctcatgttaccagtgcttcggatctgacttccgggtggcatgaggacgaaaatggcaaatggtatcagaatacagacggaacctattatgccgggggaatgcaggagattgacggacagacatattcctttgacgataatggttacatacagacaggctgggtaagccagggatttgatgatctgtactttaatgaggacggttcctataatcctgagaaacataagccgcgtattgccctgacctttgatgacggaccgggagagtatacagaccagcttcttgactgtctggaagaaaacaatgctcatgcaacgttctttatgctgggacagaatgtatcaggctgggaatccactgtacagagaatggcggatatcggatgtgagcttggaaaccacagctgggatcacccggaggcaacccttccgggcatttctgatgaggctgtgatagaagaattccagaaaacggatgaagctctgatgaaagcctgcggacagaaatccacagtagcccgtgctccttacggcgcggctggccaaagagaattcgatctggtacagaagccgtttttcatgtggtccctggatactctggactggaagacattgaatgtggaatcaactgttgatgcagttatgaacggagatctgacagacggttccatcatattaatgcatgatattcatgagacttctgtgcaggctgcccttcagctgattcctcagctggtggaaaaaggctataagctgatgacagtcagcgagcttgcgaaggcaaagggcgtggagcttcagaatgcctcctatgcagatttctgggacagcagtctgtccaagggactggtagctggctatgacggtccgcttctcaatgcggaaactgcttcagaaggcggagacggaagtgacatatctgacggcagcagtgaggagggctccggtgaaggcagcgatatgtcagatggaagcggcgaggacggttccggagaggactattcagacggaagcggagacgcatcctatgacgaaaactattatgatgacggcggcgaagaagaatattactaacgctttctgactgtacatgaaaaacatataaaaacaaatacagggtatggtactcatacataaaaaacggatttttactgcgtaacagatgataatgtctgctacgcagttttttatggctctatgtcaagttttggggtgggattatttaccgggaaaacagcatattttaccctgctcattccggtaaatcaaaaacgatctgtgagaatgtgaatcgtgcagacagcaacaggattaccggcagaatgtctgaaacaatacaaaatgcagttgaagagcccgggaaacttgggtataatatggatagaggaattgcggatcaaatctgggggtgatcatatgctgtcatctattattgtaaatgaattgataagcggattaacagaaatttttcaggataagatttccagaatcattctgtttggttctgttgccaggaatgaagcaacagaagaaagtgacgttgatattgcgattattataacaaatgaaatagatgaagagacaaaggataaattcatcaactgggctgcggagcttgatattcgatttaatcaagtgttctctattgttgatattcctgaagaacgtatgaaaaaatggggaaaaattcttccgttttataaaaacattgaggaggagggaattgtactttggagggcagcttagtgggaaagtggtatgaaaacgcagtgttttatcacatgtatccgatcggaatgacaggagcaccaagaagaaatgaaggaggggagacggttcacagatttcaggatctgatgaaatggctccctcatataaaggaactgggatgtacggcaatctatatcgggccgttatttgaatcaacatctcatggatacgatacaaaagactaccgcatggtggacaggcgtctgggagacaaccgggactttaaaggcttcgtggaaaaagcccacgaaatgaatatacgaattgtagtggacggtgtatttaaccatacaggaagagagttctttgcctttcaggatattcagaaaaacagagaacagtctcagtactgcggttggtacaagggaatcaattttgggtggaattcgccttataatgacggatttggctatgaggcatggagaaactgttttgaactggtaaatctcaatctccgggagccgaaggtgcgggaatatcttctggatgtaatcggcttctggatccatgagtttgatattgacggaatccgccttgactgcgcggactgtctggagttttcctttatggaagaaatgaggcggtttaccaatgaaaagaaagcggatttctggctgatgggcgaggtgatccacggagattacagccgctatgtaaaaccggaaatgctgaattccgtgacaaattatgagcttcacaaggggctttattccggtcataacgaccacaattattttgagatcgctcatactatccggagagaatttgatgaaaacggcggaatatacaaaggacttcggctttattcctttgtggacaatcatgatgtggacaggatcgcatccaagctcaatgttccggagcatattttcaccgtatatacgcttttatttacacttccgggaatcccttccatttactatggatctgaatggggtatacagggacgtaaagaaggcggaaatgacgatcctcttcgtccggcagttgatattgaggaagcacttctgcatccggataatccgcagcttcttaagtgggtgacgcttcttggcaggatccacagccaggaaccagctcttgcggacggcagatatcaggagcttcttctgactaaccggcagtatgcgtttgcaagaatactgggagaagaagggatcgtagtggcagtgaataatgatgacaggcctgcggagctttgcatcagggaacctctgagcggaaagtcatgggcaagccttattgacggccgggagccggaacttcaggacggcagtctcagagtgacactggcgccgggggaaagtcagatttataaattgaaatagaaacagggattaagggaggtatgtccggatgggagagaaaatgcatttttcagagttagaccagtatttgtttggtcagggaacacactatgatatttataaaaaacttggtgcgcatcccacaacgcagggaagaaaaaaaggagtttattttgcggtgtgggcgccaaatgctcagtctgtttctgtagttggcgattttaacagctgggatacagaggcaaacccaatggtaaaggcagggcctatcggtgtgtttgaggtatttgtgccgggggcaaagatcggagatctttataagttttttattgtgggaatgcacggcgaggagctttacaaggcagatccttatggcaatgaagcagagcttcgtccgggaaccgcgtcaaaggttgcagatatcggggactataaatggaaagattctacatggatgaaaaaacgtgtggaatttgatgaaaatacagatgccatgtccatttatgaagtgcatccgggttcatggagaaaacatgcagtggaaaatgaggatgaaaacggattttacaattaccgtgagtttgctcatgagctggcaaaatacgtaaaggatatggggtatactcatgtggagctgatgggaatcgcagagcatccctttgacggatcctggggctaccaggtaaccggctattatgcgcctacctcccgttatggaagtgcccaggattttaaatatctggtagattatctgcacagaaacaaaatcggcgttattcttgactgggttccgggacatttcccgaaagatgcccacggtctggcgaactttgacggaacagccgtatacgaacatcaggatccgcgccagggtgagcatcccgactggggtacaaagatctacaattacggccgcccggaggttaagaatttccttatagcaaatgctcttttctgggttgaggaatgtcatgtggacggacttcgtgtggatgcagttgcttccatgctgtatcttgactatggcaagcaggacggacagtgggttgccaacaagtacggggacaataaaaatctggaagccattgaattttttaaacacctgaatacggttgtgctgggaagaaatcacggaaccgtgatgatcgcagaggaatcaactgcatggccgaaagtaacaggcaaggcagaggatgacggacttggattttccctgaaatggaacatgggatggatgaacgactttctggagtacatgaaaacagatccgtacttccgtaaattcaaccataataaaatgacgttttccatgacctatgcctacagtgaaaagtacattctggttatttctcatgatgaggtagttcatctgaagtgctccatgctgaacaagatgcccgggtatccggatgataagtttaagaacctgaaggccgcctatgcatttatgtttttccatccgggcaaaaagcttctgtttatggggcaggagtttggacagcttcgtgagtggagcgaggaaagggaacttgactggtaccttctgggagaggagaatcacaaagatcttcagtcctttgtaaaaacacttcttcatatgtacaaaaaatatccggcgctgtataaagcggacaatgatccggaaggctttgagtggatcaatgcagatgacggagacagaagtattttcagctttgtgcgcaaatctcctacaaagaggaacaatcttttatttgtggttaattacacaccggtagagagaagcgattacagagtgggcgttccgaagaaaaaacagtataagctgatcatggatgagaacggacttctggaaaaaccacagacttttaaggcggaatccaaagagtgtgacaaccgggaattctcttttgcatatccccttgcgccatacggagtagcggtatttacatattaaatataaaaatgctatcgtttaaggtgacttggaatatattttgaccggtttccggatataaaaaacaagtaatgttttgtcagattttttggcagaaaaaccattgcattttataaaaagatgcgttatactgtacgcgtctgaaggaacagacaattacttatgacgaagaaccgataatagaaattctgaaaggagaataaaaatgaaagtatccaatattaaagatgtagacaaattttttgaagtagtagatagctgtaacggtaaagttgaacttgtaacaggagagggagacagactgaacctgaaatccaaactgtcccagtacgtatctctggcaaacattttttccggcggagagattccggagctggaaatcgttgcatatgagaaagaagatatcgataagctgttaaactttatgatcaacggctgatattatgaagcaaaaagcgggggcatgacaggttcatgtccccgttgtgtgcatatataagtgtctgcgaccagggggtgtttttacttcctggtcaaatgtacgttgaaaacaaaaacagaaaagaggcaaaatcatgacaaaaattgatattatttcaggttttctcggagctggaaaaacaactcttattaaaaaacttctgaaagaagctttccaggacgagcaggtagttctgatcgaaaatgaatttggagagatcggtattgacggcggatttctgaaagaggcaggaattgagatccgtgaaatgaattcaggctgtatctgctgctctcttgtaggagacttcggagcatctctgaaagaagtgattgacaaatatcatccggacagaatccttatcgagccgtcaggcgtaggtaagctttctgacgtgatccgcgctgtgcaggatgtccaggaagaaactggtcttgcgctgaacagctatacaacagtggtagatgccaaaaaatgcaaaatgtatatgagaaactttggtgagttctttaacaaccaggtagagtatgcaggagccattatcatgagcagaacagacattgtggatgaagagaaggcaatgcagtccatggagcttctccgcagtctgaacaaaaaagcggctatcattaccacacctattgaaaatctggacggaaagaagcttcttgaggtaatggaaaatccggtatccctggagcaggagatgatggaagaagaggtatgcccggagtgcggacatgtacatgagcacggtcatcatgaccatgaagagcatgagcacgatcacgagtgcggttgcgggcatgaccatgaagagcatgagcatcatcacgaccatgagtgcggctgcggacacgatcacgaggagcatgagcacgatcacgagtgcggctgcggacacgatcatgaagagcatgaacatcaccacgaccatgagtgcggctgcggacatcatcatgatcaccaccatcatcatgcagacgaggtatttacaagctggggacgtgagacgattaagaagtattccagagagagtctggaaaagattcttgccgttctttctgagtcagaggagtatggcgtgattcttcgtgcaaaaggaatgcttccggctgaggacggaacctggatctatttcgatatggttccggaagaaacagagatccgtgaaggcgcgccggaatatacaggccgtctctgcgttatcggttccaaattaaaagaggaaaaactggctgagatctttggattataaggcagatcaggaggaataaatgaacgagattacagtaccgatttatctgataacgggttttctggaaagcggcaaaacctctttcctgaattttaccctgcagcaggattatttttatacagaaggaactactcttctgattctctgtgaagaaggggaagtggaatacgataaggctgttctggaaatgagcaataccgtagtggagatcattgaaaaagaagaagaccttacgacagaccgccttgctgccatgaatattctgtaccagccggaacgggtgatcattgagtacaacggcatgtggcttgtaagcaactttgaaaaaatgcagaagccggagggctggggcgtggagcagcagatcacctgcgtagatgccagcaccttccagatgtatatggcaaatatgaaatccatttttatggatatggtaagaaacagcgatatggttgtgtttaaccgctgcaaaaaagaggatcctcttgcaacctacagaagagggatcaaggtggcaaatcagagagcggaagttatttttgaggacgaggaaggcgagcttgacgatattttccaggatgagatgccttttgatgtcaatgctcctgtgatcgatattttgccggaggattatggaatctggtttgtggacgctatggatcatccggaaacttatgtaaataaaactgtgaagtttaaggcaagagtaatgaagcccagaggaatgggaagtaaattctttgttccgggccgtacggcaatgacctgctgtgcagacgatacaactttccttggttatgtgtgcaaaagcgcttttgcgccgaagcttcagcagggtcagtgggtagaagtcactgcaaaagtgggaattgaaaaccgtatggaatatcagggagagggaatcgtgctttacgcagattttgtagagccatgtgaacctctggaagaagaaatggtatattttaattaaggagagcggcatgtatttagtagttggtctgggaaatccaggaaggcagtatgaagccacccggcacaacatgggctttgatgtgatcgaccgtctggtggaggaacacaggattccccagggcggcgtcaagttcaatgccatgtacggaaagggaatcatcgggggagagcaggtacttctgatgaaaccactttcttatatgaatttaagcggcggcccggtgcgggatatggcaaattattttaaaattgattcggaaacagagatgatcgttatttatgacgatattgatctggagccgggacagctaagaatccgcaagcagggaagcgcaggcggacacaacgggatcaaagatctgatcagacagcttggaacgcagaagtttgtgcgtatcaaggtgggcgtaggagccaagcctcagggctgggatctggcagatcatgtactgggaaggttttccacacaggagcgcaaactggtggacgaggcgcaggaaagagcctgtaaggctgtggaaatgattctttccagaggaacagatgcggcaatgaatgagtttaacaaaaagacgggggtcgtatgaaagcatttttgcagcctctgcagaatcttgcagagatggaacaaatacgggaacaggcaaaagataaccgtggcgtcctggctgtcagcggctgtatggagtcccagaaagcacatatgatatatgggctttccgggctttttccatgtcatctgatcatttctgaggacgagcgcagcgcaaagcagatttatgaggactatcgtttttatgacaaaaatgtttattattatccggcaagagatcttctgttttttcaggcggatatccacggaaatctgctgatacggcagaggatgcaggtgatccgggctcttcttacttcagaagagatcacagtggttacaagtgtggacggatgtatggactttctcgctcctctggaggaaatccggaagcagcttctctatttccgcaatgacagccagcttgacattgataaattaaagacttctcttgtaagcatgggctacgagcgtgtgggacaggttgagatgccgggacagttctcggtgagaggcgggatcattgatatttattctctgacagaagaaaatccctggagaatcgagctgtggggggatgagatcgattcaatccgaagctttgatactcagagccagagatctctggaaaatctggaagagattaccatttatccggcggcggaacagcagacagaaaaaagcggtctgacttttcctgactattttgaccgggaaaagacaatgatatttctggacgagccgaaccgtctttccgaaaatgcaaaggcggtggaggaggaattccgtcagagctgccgcaaccgtcaggaaaaaggagagcagaatctttctgagggctggatgtgttcctgggaagaggtctgccataagctgaataaacgcaactgtgtttcactttctgctctggagccccaaaaagcagggtggaacattaccggaaagcacaatctgaccgtaaaatccatgagctcttatcagagcagctttgagcttcttgtaaaggatcttcagcagtacaaaaatcagggctatcagatcattcttatgtcaggctcccgcacaagggcagagcgtctggcaaaggatcttcaggatcaggggatgaacgccttttatggacaggacggcgagcgtatcctcaatcccggagagatcatggtggtttacggccatgccagaaaaggcttcgagtatcctcttgtaaagtttgcggttattacagaaactgatattttcggcaaagagcagaagccgcgtaaaaaaaagaaaaactataacggtcagaggatccaggacttttctgagctgtccatcggggattttgttgtccatgaaaagcacggacttggaatttataagggaattgaaaaggttgaggtagacaggatcgtaaaggattatatcaagatcgagtaccgtggaggaagcaacctttatattcttgccactcagctggacgctcttcagaaatattccggggcagaggctgcaagaactccaaggctgaacaagctgggaggccaggagtggaaaaagacaaaatcaaaagtaaagggcgctgttcagaacattgcaaaggagctggtggagctttatgcagtgcgtcaggaaaaagaaggctatgtgtgcggtccggatacagtgtggcagagagagtttgaggaaatgttcccctatgaggagacagaggatcagcttgctgccattgaggatacaaaaaaagacatggaaagcaccaagatcatggaccgccttgtgtgcggcgacgtaggctacggaaagacggaggttgctctccgcgccgcctttaaggctgttcaggaaagccgccaggtaatttaccttgtgccaaccacgatccttgcacagcaggtttataatacctttgtccagagaatgaaagagtttccggtaagagtggatctcctgtgccggttccgcactgcagcccagcagcaaaaaacgatcagtgatctgaaaaaaggccaggttgacattattgtgggaactcacagagtcctttcaaaggatgtggagtttaagaacctggggcttctgatcattgatgaggagcagcgcttcggcgttgtccacaaggaaaagatcaaacagctgaaaaaggatattgatgttctgactctgactgccacgccgattccaagaactcttcatatgagcctgatcggaatccgcgacatgagcgttctggaagagccgcctatggatcgtgtccccattcagacttatgttatggagtatgatgaggaaacagtaagagaagcggtaaaccgtgagcttcgcaggggcggccaggtatattatgtatataaccgcgtcaatgatattgcagaggttgccctgagactgtccagacttctgcctgatgccagagtggattttgcccatgggcagatgagcgagcgggaactggaaaacgtaatgtttgcatttatcaacggagacattgacgtactggtttccacaaccattattgagacaggccttgatatttccaatgtgaataccatgatcatccatgattcagaccggtatggactttctcagctttatcagctaaggggacggatcggaaggtcaaacagaaccgcttatgcttttcttatgtaccggaaaaacaccatgctgaaggaaactgcagaaaaaaggctttctgccatccgggaatatacagatctgggaagcggatttaagattgccatgcgcgaccttgagcttcgtggcgcaggaaaccttctgggcgcagagcagcacggacatatgaatgcagttggctatgacctttactgcaagatgctcagtgaggctgtcaaggaagccaagggcattcatacaatggaggactttgaaactaccattgaccttaccatagacgcttttattccggatacctatatcagcaacgaatatcagaagctggatatttataagagaatcgcaggaatcgaaagtcagcaggattatgacgatatgctggaagagcttctggaccgcttcggggaaatgccgaaggcagtgctgaacctccttgccattgcaagaatgaaggctctggcccatcgctcttatgtaacagagatcaagcagcttggaagcgacatgaggatcactctttacgaaaaagcgcatatagatccggcaggaatcccggctcttatgcagaaatacagaagaggcctgcagtttaaggcagagcaggaaccgaaatttatctatacacctcagggaagaccgctggaagctctgacagatttccttacagagctgaaccgcctggtggaggagtagggaatctgtgaacagtaacagtttgtgacatcggaaaggcagatctgaaaatatgttgaaaatatggtataacacaggaattgaatatttgaatgatgctccggcgtactttgataatgtgtatgaagatgaatggctggaggatgatcttgtaaaggaaatgatcagagatgttgaccattcagaagttttaacacctcatattattgagagcccggttctgggagcaattactcccagggaattatcaggaggagttaaagttctgattctgatgctgaaggatgactccttcatttacaatatgtctaattgtggcaataattgtgcaaagtgggtcttaaagattgcagagaaaaaagatttgactgtttttttaagacatattatgaggtttgaaggagagtttgagattcagattatgaatacaggcaggattgtccataacagaagtgaatatgtaagaggactccttgaagcggagggaatgctggatgaatggtagttatcacttttgcgctaaaagcaggaaagccatttttgattttactataaaaagaaatattactgtaattaaaggagacagtgctacaggaaaaactactcttcttcacattctttatgaatatctgagagtgggaagagaatcaggatactcagtgtctgcagatgttgattattatgtttatcttagacgtgaggttggacgtgactggcaggatgacctgtttcctttaaaaaacacagtgatttttattgaggaaaataacaattttgtgtttggaaaagagtttgccgattttgtaaagcattcagggaactattttgtaatagttacaagagctcctattactgtgcttccttacagtattcatgagatttatgaaattataacagatggaaaaaggactgatataaaggaatcctatcatgagctaaaggaactgtacagtaattatccggaagcaggaaacaatcttttaaaaaatattgtgaccgaggatagtaattcaggataccaatttttctcgaaggtttttaaggaaaggcaggttatcagtgcaaatggtaatggcaatataatcaataccgtccgcagaatgggagaaggagatattcttgttattgcagacggagcagcatttggagctatgatagaaaaatgtctggagtttttcggctctgaggataacagaagaattacaggatggtttccggaggagattagaaagggaatctgtgcaaaatgtgtgaaaaatcatggaattttgtgattctccttgctctcagggtgaaaaaagattatacttgtagcaatgaagtcaggctacaatggaggaaaatatgaaagaaagatcaaaacgagcagccgttgccgtgcttgcaggcgtaatgactatgggaatgcttgccggctgcggtgaaaagaaattagatggaactcagacagttgccacagtaaacgaaaccgatattcccatgggagtattaagcattatggtccgtcagagtcaggctcaggcggaagcaatgtacgcaagccttatgggcggacagggcggatattctatctgggaatctgaggcagaagaaggcggaacctacggagaacaggcagttaaggattctctgaaggatctggagactctgtatcttctgaaagaaaaggcagctgattacaaggttgaagtaactgaggacgatcagaaagccattgcagaggctgcatcacagtttatgaaagccaacagcaaggagactatcgagactctttctgttacagaggatcagataaaaacatatctggagctgcgtacctatcagatgagaatgcacgatgccattatagctgaagtggacacagagatcccggatgaggaagcccagcagtcatcctttacctatgtaagcatcagcactgccgatctggaagaaaaagacattgaggcgaaaaagaaagacgctgagaaaatccttgatgaaatgaaaaaggatccggaagctgattttgacgaaacagtaaaagctgtcagtgaggactacaatgctctggaaggaacctttgatacaaacgaaaagaaagaggataaggaagaaggcgaagctgatctcacatcctccggctacccggaagaggttatttccgtgctgagaactctcaaagacggagagcttgctcaggatgtaattgaaacagacactgctttttatgttgtaagactgaacaaagtaaatgatccggaagctactgagaataaaaaaacgtccattcttgatgagaaacagactgaattctatacagaaacaacagataaatggttagaagaagctgagatcacagaggataaaaaggttctgaaaactctggaactgaaggacaaccataaatttgtgatcggtacaactgccgagccttcagaaacaccggaagcagaagatgcttctgaggaaaccccggcagaggatcaggttcttgagcctgcggaagaagaaactgaggaaatcgcagaggaaccaacagaagcgccggaaagtgacgcagaggaaactgaaacagagaaagctgaagaagaggggacagaagatactgtaaagacaacagttactcctgagccaactgaagaggcagaaaagtaacacgattttagaaaaaggatatcacgattggcagacagccttttgtgatatccttttttacggagaaaattaatgaagagtagggtcttctttaaaagacacatggattccgttaatctccacatccccttccatggggatcacaagacattttctgccgtcaatgatctttgtttccacaagctctgcacggtccgggtccacatggatcaccacatcaggggttttgatctccatccgccgggtgttggtaatattggaagccatgagagatgcattttctccggcagtggcctcatagcaggaatcaaaggcttccagcttttcatcttccacaccacattcctcaaagagccgcttcacttccggctttgtcagtacagccggttccggagcatccttttgtgtttctacccactcatttaatttttcatggatatttataactgtgtcataggcgcagtcttcgccaagggtctcctctacaagggcattaaaggaatcccgctggcctcctgcagacagaggagtaacgcagccgaaaagctcgtccacaaaggtacttctcagctgttctgcattttttgaataatagagaagcccgtggatatctgtacttctgtcattaaatacaggaaacagaaagccaagatcaggcatttccacgatccagtcccggatgcggtcctcgatattgtttgtttccgcattgtagcaaagtcctgccttggaaagttttaccggacagatgctgcagagaatatggtcgtagatctcgtcagaggcatcaaacatttccatgccgtcagaggacttgccgggaatatcgtaaactgcatggatcaatataatgtagtagttttccccataatcgtagaactggatgatcttatcataaaattcctccagaagtgcaggatcctgaaggttgcttccccggagcttcagaaggaattcctgggttcctccttctttttcctgttccaggggaaattccatattgatcagattttttccgatggtgccggaaagagtttttttgaaaatttcaaagtatttaaaagcttcctcttcagaaagagaaaggaaagcttctttcagctctgtttttttgtttttttccccgtctacataacagccgcagatacgggtgatacagcagcagtcaggggtaaactgtttttttatttcagatatttcttttttgttcataggctgggaatctcctttgtatgtgtgtattcaggttggtatcttgtgcccggtaacgtagccagaactttacaccagggcgtgttttgtgtttgttgacaccattcacagttctgtatgataaaagtttttcagaaaaatgtaagcagccgctacagaaatagaaacggctgcaaatacagtatcatgataaagacagatgtcttctgttctttctgttttaatataacacacgggtttttcttctgcaagtaatttaccgggacaggaagcttttgtccccatgtcctggaaaaggcggaatttactcttgcagtccggaataccaaaatcccgggaacgctaaaaaacatatgtatttttgacagcaatactgttaaaataaagataccgggaaacaaagttccgggtgctttgagggaggaaaatgaaatgaaacgtaagatactggcagcggtgttcttgacggtgacggctacatcagcatttacaggaacagatctgattctggctgcagagaaaacggaagagaccgctgtgcaaaagccggatatggagggcatagatacagaaaatacaaagatcgggatttccatttatcagtttgaagatacctttatgactttgtatcggacagagcttgtacgttatctgacagaagaactgggctttaaagaagaaaatatcctgattgaagatggaaaaaatgaccaggacaggcagacagagcaggtggaaggatttattgaagatcaggcagatgtgatgatcctgaatctggtgcacgcatctgcggctccacagatcacagagctttgcagtgaagagggaattcccgttgtttatataaaccgtcagccggattctctggaaatggaaagatgggagcaggaaggaatccaggccgcttatattggcgcagatgcaaggcagtccggtatttttcagggagaggaaattgcggtaacagagaatcagggcgatattaacggcgatggagaagtctcctatattatgatacagggggagccggaaaatatagatactcaatacagaacagcgtattctgttaaggctctggaagaagcaggagtggaaaccagggagcttctggctcagacaggagactggagccagtcacagggacagaagatcatggaggaagcccttgacgagtttggaaatgatatagaagtggtattctgcaataacgacgctatggctctgggcgcattagaagcaatccgggaggcagacagaacagtaggagaggatatttacctgacaggggtggatgccctggaagaagcagttcagagcgttgttgacggagaatttacaggcacggtttttaatgactatttcagccagtcctacggggcggcagagcttgctgttaagtttctgaagggcgaggaaacagagcctgttactctgattgattacataaaggtgacacaggagaatgcagaagagattctggaacttgttaattcataatgcaattaggtgaaaaagaggagaatatgaaaaaaaacgatattttattgaaacccgttgaaaaggattctctttatcttaaaatttcggatgctgtttacagttacataaaaatgaataatctgcagccggatgataagcttccctctgaacgggatatggcggcaatgcttcagacaagccgtaattctgtgagagagggtctgcgtattctggaagacagaggacttatttatgtaaaaacaggaagtggagtttttgtaaaggatccgtatggagaacacagcgccatttctgtccgtttaacagaatgtaccacagaagagcttcaggaacttcagacgattctggatcatcaggcggttctgaatgcaatcagcagaggaaccagggaagaaaaagaaaagctcgtttctattgcgtctgagcttatggaaaagtattcccgaaatatctacagccacacgctggattacagctttcatacagagctttatgaaatgggaagaaataaggctgtgcatcaggtgatccagggaatccgtgacaggcgttttgtacagcgggagaatgctgatggtgaaaatgattctgtgtggcttgcaacgatcccgcagcattttcagcttgcagaagcgatttttaattctaattctgcggcggctctggcagctgttgatgaaatcctggagcatggacttagtctgatcgatcattccagacagaaatagttggacaggagtactatataggaagtgtgctggttttagacagaatcgtttaccggaacagattctggaaaaacagcaggttataaaaacagacaggaacctatttgatatcaatgtcggttcctgtctgtttattttataattcttttcctgtcagttccacatattcgtcgtagttatctccgccttttttaattttggcaataccaaatccggtgaagccccagataatggcaaaaataacacctgtgtaacacagacatgcccatggagcatactgcgcggtaggaactcccagagtggaggtcatgtaaacgcctgccagtgaccagggaaccagcggttccacaacggtgatactgtcttccagtgtacgggaaagattctttgtttcaagaccacgtttaatatattcttcccggaacagtcctccgatcatcaggaaggtaacagaggcctctccgattacagtgataatgatcacgcccagaagagcagtaacagtaataagctgtccggtaccatgaatgtgcttcatgatgtggctgaggatcacatccagacatccggaaacagtaagcgctccgataaatccaaaagcacagaatgccatcagcgctgtgttcatcatggaagccataccgcctctctggagaaggtttggaacttcttggacaattcctgcaagattcagagacggatctgtaaacatttccattttgaatccacttaccatacttgttgcgcaggtctggaaggaaaaatcctgaactgtcattgcgatcactactgctacggcagaggagatcatcataacaggaatggtaggcttctttaagagggagcctgcaacaacaattacaggcggtacaagcagcagaaggcctaccggcatactcaggtcaaaaagctctgccagagtggtgatgatagagtcaacctgtgagatttctccgcttccggcaaaagaaattccggcaatcacataaaccacgcagctgatgacaaaaccggggattgttgtgtagaacatatgcccgatgtgtttataaaggtttgttccgctggcaatggcggacatattggtgctgtcggagagcggagacattttatctccaaaataagcgcctgcaacaatggcgcctgctactgccggaagaggagcgcccatgccggcagccacgctcatgagagctgctcctacagttccggcagcgccccaggaggttcctgtgctgacagaaagaatcactgtcacaaggaaagaggttacaatgataaatttcggattaatgatctgaagtccgatataaaccaggaacgggatagttccgctgacgatccacgcgccgatcatcagtcctacagtgatcagaatcatgatagcaggaaaagcctttgccagcttatctacaatttcattttccacatccttccaggtataccccagaaagagacataaaacaatggtaaaagccgcacagataagaagtaagatcttaatatctatgctgaaaataattaaccccaaaaacaatactacaaacatgaacgccagcggcagaagcgcaagtccgagccccggtgtttttttagtttttccgttggtattctctcccataattaagtcctctcaatcagattttatcaagagcctgtgaaagatctgcgatcagattttcagctccctccagtccacagtgaagtcttacaatgcttctgttcaggttatgaaaagcctgttcttcttcactccagttataagtataggcaatagcaagactttcaaagccaccccaggaacagccgcgctcaaagatcttcagactgtctacaaatcttgcggtatcctctgcggagccgtcaatttcaatactcatcagaccgcattctcctttttgctgcttacgtgcaagctcatattgaggatgagattttaatcctgtatagtatacatgttttacctttggatgattttccaggaattcagctactttcatagcagtttcataatgtctctgcattctcacatccagggtacgcagaccgcggattgcaagccatgcttccataggtcccagtacacctccgaaccaatctctctgaaccatgatttttttcatgaattcatcgtccctggagatcagaactccgccgatcagatcgctgtgtcccccgatatattttgtcatagtgtgcataacaatatcgattcccatatcaagaggcttctgaaaaacaggagtggaataggtgttgtcgatataggttttaatgccgtgtgcatgagcaagctttgcaactccctcaagatctacaactgaaaaaataagggtagacgggctttccagaatgatcagatctgtttccggacggattgcattttcaaaatctttcagatcagttccgtcaacataggttacgctgatctccattttttctttcaggaaatcattgagaagatgctgtacaggtccgtagcttgccttcatacagatcacatggcttccggttttgcatacagcgaggattgccgcggcgcaggcagccattcctgcagaaaaaacaacggctctggttccgtgttccagcgcggcaagcttcttttcaagaatagttacggttggattagacgcccttccgtagtaatactcatctttgaaaatgtccacagagaagtaatcctccacagaatcaaatacatgaagggagttcataaaaatcggcggtgtcacagatttcatgtatttggagggatcttctccaagatgagtcattgccagtaaatcctggttatctgtcattgtgcttcctcctttggtacaatggttcattggttgaaccaatttataagcatattatggactttgttcaattttttgtcaatatttgaaaaaaatatttttgatttttgtaaaaaagatacaaaaaccaatgataaaatttgtgcgtttttaaggtgaaggaatccaggaagagattttgccgcactcaaaaatccgtttataaaacaggcttaccatggtataatatttttataatgtggaggaaattttatggaattatataatgttttgctggtggatgatgaggctgacgttcttcaggcaatgaagaaaaaaatcgactgggaagcgctgggattctgtctggcgggaaccgcagaaaatggtcaggaagccctggaaatggcagagcagcttcatatagatgtggttatgacagatattaaaatgccttatatggacggacttactttgtgcaaaaatctgaagcagagctaccggaatatgaaagtgatcatttattccgggtttgatgatttcgagtttgccagagaagcggttcacctggaagcagaagaatatcttctgaagccgatcagcgcaggagatatggaggctgcgttttcaaaagtccggaaaaagctggatcaggagtatgatgaatacaggaatctgaacaggctgtcagagtattatcgaaaaagtcttcctgccatgcgggagcagcttgttatggggatcctggaaggacggattgcaggagaacgggccagagctatgatggaaacctatgaaatatgtctggattctcctttttatgtggtagctgcactgtatatggatgtaaatccaagagaagagcagccgcagccggcacagctgtttacgctgtccttaaaggatatggttcaggattatctgaagaacagaacccggtttttcagtacggcttttctggatcaggtaattgttatttttatgctggatgaaagagaagaaatcgatcaggttctctatcatctggaccagatctgcaaaatgggcttccgtgttctgaagtcatctgtgacagctgctgtgggacagatctgcgccaatacagacgctctgcatacttcttatgaagaggcagtaaacgccatggaatacagaagtattctgggaagcggccaggtgctttatatcaatgatattgagccctgctcggaagaaaatatccttgtcacagagcatgagtttcagaacctggttcatgcagtgaagctgggaaacagggacgaaacaaatgcagccattgctcagattatggacagtatccggaaggaaccgatctctccgggacagtatcagcttctttttatggaacttttgtctgagcttatgaagatcgggcgcgcgtataaacttcatcccaatcagattttcggggaacatgcaggctcatggcaggagctttacaggatggtaacagtggatgaactggagggatggcttcaggaagtgtgcaccaatctgcggcatgtcctcaggcatgaaaggcgggattcggcagcaagacttacggagcaggcaaaggcatatattgaggaacattataaagaaagcgacctttcggcggacagtctgtgccgttgtctgaatgtaagcgcagcttatttttctacgatatttaaaagagaagtgggcatgagctttgttgcttatctgacaaagatacgcctggaacatgcgctggagcttcttcgtacaacagaggataaaacatatatcattgcgtccagagtggggtatatggagcccaattatttcagctatgtatttaaaaagcagtatggaatttccccgtcaaaatacagggcagaaatgtgcgaaaaggagaaaaatacagattaaggtcaaaagagttatcagcttatgaagtacataaaaaataaatggaatcagcttgttggctatataaaacgccgggatctgcagtttgtgatctcagcttcttttaccctggtcgctctcataggaatggtatttattggcgtttttctttatcagagttatggcagagcagcaaaggaaatgatgctgaatgatacccgtcagcttgtaaatcaggttgagatcaatctgaataattatctccggagcatgatgcgtatttctgacgccatgtactataatgtgatcaaaaaagtagacatgagcaaagacgatatttctcatgaactgaaccttctttatgaggtaaataaagacagtcttgtaagcattgcatgtttttcggagaatggtgagctgctgggggcagtgcctgtgggaaacgtaaaaaataatgtagatgtcacacagcagagctggtttaccagcgcccagaataaaatggagaatcttcatttttcagagcttcatgtgcagaatatttttgaaaacagcaatggacgctattattgggtagtgtctttaagcaggggagttgagcttaccacagaaggcaaaatatccggtgggattctgctggttgacatgaatttcagcggaatacgtcagctttttacagagatcaacagccaggatatggggtatgtttatcttattaacagtgatggtgagattatttatcatcccaaacagaaccttattttttccaatatgttgaaagaaaataataaagtagccagtcactatgaggacggtgtatatgaagaaaggtttctgggcgaagaccggacagttgtggtaaaaaccgtaggctataccggctggaaaattgtcagcgtgacacccacagacaggctgtttaaggattttaacagaacggaaattatggctgtgatcattattatcctggctgtatgtctgatgatatttgccaatcggtttgtggctgtacgaattgtcaaacctctgaaaaaactggaaaattctctgaaagctatcggggtggatcagaaacctgaaatttatattggaggttcttcggaaattcagcatctgggaaagaccatccgttctatggtagatcagctgcggaaactgacggatgatattgtaaaggagcaggaagaaaagcgaaaaagcgagttggatgcccttcagtctcagatcaatcctcattttctttataataccctggattctattatgtggatgatagaaagcgaacgctatcaggacgctgtatttatggttcatgctcttggaaagctgttccggatcagcctttccagaggaagaaatatcattacagtaggggaagaactgcagcatgcaggaagctatctggatatccagaagtacagatataagaacaaattcacttccttttttgaggttgaagaagggattgaaaagtacagaacaattaagctgatcattcagccgctgatcgaaaatgcaatctattatggtatggaatatatggacggcgagggagaaatttatatcagggcttatacaaaggatcaggagctttttatagaagttgaggataatggtccgggaatgccggaagagcaggtggccggacttctgacagaggaatctgaaacccggagcagaggatcgggcatagggctgaaaaatgtacatcagcgtattcagctttattttggaacagagtacggactggaaattgaaagtgagccggatgaaggaacaaccgtgcgtattcatcttcccgaaacagaagaggcttccagtgtggagaagggggacagacaatgaaaaagaaacggtttcagtggaaaagtctggcgctccttttggctgctgtgaccgcgctgggcggcctgtattactacggggtttttgcccggaaaaaagagtcttcggatgtttattcagtgattctttatcagaatacagaggatgaatggggaactcttattcagggaatcatgcaggcagaagaagatctgaacgtagatgtaaattatatttatctttcagaaaatgatacggcagaagatcagataaaggaagtaaataaggagatccgcggaaaaagttcaggtattttaatggctgctgtaaacagccgggagattcaggaagtcctggaaaatatgatgatttctattccgattatttttgtggaaacaggcgcaggagattcttttcctgtgatccggtctgatgattatgctatgggaaaggccttgggggaggctgttcttcaggatatggaacagacaggaaaccccaggaaggtaacgatcataacagaaaatatgcagagggacagtgtgagcctgcgctataaaggcctgaaagatacactggagcaggcagaacagagtgtgctgataagcagtcttggcggagagttcagcgccagtctttttgaccagatttcctatctggtaactctggataaaagtacaacagaacgggcagctgcattgtggaaagagagcagtcagacccggggggaaaatagaaatatctgcaggatatatgggacaggaaacactgctcagacggtaaatgctctggataacgaagatatttccatgctggtttatcaaaatgaatttaacatgggatatcaggggcttacctgcctggtagaaaataagaaaaaagagtggatagagaaaaataccagcatcagatacagaacagtaacaaagaaatctctgtatgaagatgaaaatgaacgtttgctgttctcggatatctgatccgtaggaggaagggaaagtgaacagggaaaaaagaacatgggtcctggcaggaatatgctgtatgacagtagttttcagcggatgttcgggcagcaaaaagactgcggaaatacagccgcagagcataaagatcggtgtcagtgtgtacgatcaatatgatacatttatgtcagaaatcatttcccagcttcagtcatatgccagagaaaaggaaaaggactggggaatttccattactttgaatattcagaatgcagatcagagtcagtttactcaaaatgatcaaatggaaaattttattgaagaaggatgtgatcttgcatgcattaatctggttgacagaacggacgcttccatcattattgaaaaagcaaaaagtaatcatgttccagtgatattttttaacagagagctggtggaagaagatctggaacgctgggaggagctttattatgtaggggcagatgcttttgaatccgggcagcttcagggagaaatcctggtagaacaatgcgaacaggattttgtatctattgacacaaacggggacggcattcttcaatatgtgatgctggaaggcgaggcaggacataatgattccatggtacgcagtatgtctgtaatcaataaaattacagaaagcggatacacagtagaaaagcttgctgatgagattgccaactggaacagggatcaggcatccactaaaatgacaccgtttcttaattcttatggatctgaaattgaagtgatacttgccaataacgacgatatggcgctaggggctgccgatgctcttaaggcccggggaatggacagtcagtcagacgactggccggtgattttgggagttgacggaacagatgtagggctgaaggccgtagaaaagggagagcttcttggcactgttctgaatgatgcaaaaggacaggcccggggaatgctggagctggcgggctctcttattctgaaaaaggatctcagtcctgaatatacgcttcaggatggaaaatatattcgtcttccctatcagaaagtaacggctgagaatgtaagtgagatacagagccgccagtcagaataaggtatataaaaaccggggtctgaaagaccccggagaataaagagaagatgaaagcatcagccttcaattgaaatatagccggtgttttctatttttttcggcgctttctttggtacagaaagcctcaggatgccgtcctcatatttggcatggatatcttcctgggcaacatcctctcctacaaagaagcttctgctcatagtgcctgcataacgctctctgcggatgtaattgccctgtttatcctgctggtctttgtcaagacctttggcagcggataaggtaagatagccgtctttcagctgaactttgatttcatcttttttaaagcctggcagatcaacatcaagttcatagctgtcgtctttttcacggatgtctgttttcatcatgttctgagcatgttttccatataatggatttttctttccccagaagttgtcattgaatccaaagttcatccagtcatcatcaaataagttttctccaaaaatactaggcattaacataagtcatctctcctttttttattatctatgttaatatgtgttattacggaaccgggaggtttcaggaaattaaagatgcaggttttgtatctttttatttcctttcctttgttctatatgtaatataacacttattgttagcagagtcaataggtgagtgctaattattttgtgaaaaaactgtgaagtccagactttccctgattttacaggttttacggcggtttttctttataatcctctgataatgttcaaataatcttgtctttgatcaacaactgcatatacagtgacaattttctggtattcatcaattttataaaataccagatttttttctgtaatcaaaatcttatagccctgtctgcgaagaatcatataacgaggatctgatcctatatgcggatcttctccaagcagcagtatctgttcttcgagtttatccaacctctctaatgcaacatctacaccaaatttttcggcaatatcaagagtaatcttatgaatgagagcatccgcagtatccgttctgattactgtataattactcatttcttttctcctttaatattgcacgcaaattggaaaatgtatctttcatcggcgcaactctgcctactcttacatcttcttctgcttctgcaagaatttccagcagttctatccttgccttcatacgattgtattcttcatatccaagtgatactgtatctcctcttccattgacagtgataataacggcctctcgtccttctctgcattgctttgatatttcactgtaatgatttcttaaatcggctgatggtctaattctttcctgtaaagtctgcatggtgatacctccgttcttttatagtcaaattatatcgttttatgactatgttgtaaaccattaatcttttctataaaagatttattgcttgttactgttaaaaaatctttacttttcacaaattatgctttttcccagtctctaaatccccactctttgagtgtctgcggtgaagagattaacgacttagagccatataagccgacaccaaatttttatattgtgacgatttcaggtgaaatgtgataaattcataaaacctgcgaaaaacctgtaaagagcctctttacagcactatatgaactaagacaaaacctgtactcctatatgcaatatagaattacaggttttattaatatcattaaaatcagatatattcaatttccataagtcgtaaaattccggaagtatttttataatctcgttttccagctccaataccagtctttataatatggaaagaggtaggcagtttacaagacgtaaaaatagcagcaacaatagcagctccggtaggtgtaataagttctccctgaactggttggatagaaagaggaatttgataccgctttgtaatgttagcaacagcaggaaccggaacaggcagaataccatgctgacatcgaatagttccagtaccatcgcacaatacaggaacaaatatttccttataccccagcatatccagacaaatagaaacactggcaatatctactatagaatctatagcgcccacttcatgaaaatgtactttttcaatgggtattccgtgagcctcagattccccttctgccaagatttgaaatattttttttgctgtatatagagctgtctgagtcatagaactggcttccagtatctgaaaaatatcagaaagactgcgatggatgtgttcggaatggttatgtatgtgctgtgttgtctctattgaagtatgggcagagttattgtgttcatggggagcatgatgggaatgcccatataaatattccatattatgatcattattttcgtgtaaagaatcaagaatcacattaaagtcatacgctgaaattccagattttacaacagtttttatttgtatttggtaaccttgaagaggaagtgtttttaaagtctctgtaagtttatgaggatcagcgcccaagccgagcagagcggcaacactcatgtcaccacttattcctgaagaacattccatgtataatccttttttcatataattaatctcctttataacagaactgtttgtgtaaagtttatttgcgtggtttatcgcagctttctctttttgccagatggcaggggaaatttactttcatgggaagagtgtgccctccgtggatccggtcaattaatattttggcagccatacttcccatagattctaccggcacctgtattgtagtgagtgtaggggacagatactgggcaatatcaatatcatcaatgctgataacagaaatatctttaggtatttttagtccaagatctttaatagcacggattgcaccgattgctgtaatatcattaccacagaaaatggcagtcagattgtttgactgagacaataatttttttgcaccatcatatcctccatttgaagaaaatggaacaggagcaacaaaagaattattaaatggcagaccatgctgtgcaagtatgtcccgataaccctgatagcggttttctgacgaggtttcgcctatgtatccgatacatttatgtccgagttcaattaaatacttcatagcgcaaatacttgcatcatatccgtcgcagagaatttgatcaaactcagcatcaatgccgtttaatcccgtgtatgctacatttcgaaaatgttgtttaagaaatttaagagtaggtttattacaacgacccaatacaacgcctccgcttacatcattatccagaatcattcggtatgtttctgctttattgatatcaaatgatgtaaatgatgatttaacaatataattttgtttatatgcttctacttctatactccttgccagagaagagaaaaaagggtcatttggatcatcaggagttcttgcaaagagacagaaaagagaatgcgagtgtgatttagacatagattgtccaagttttaggttttgggccgctgaattaggaatgtatcctgtgcggcggacaacatcccaaatacgttcttttacttccgggctggctgccttggaacttgtgttattgattactcgtgaaacagtggatatagaaacccctacttcttgagcaatttcttttaatgtcatggaaaggctccttccttttagaaaaattttgaacaagagaaaaggagatttttacaaattataccatattttaacaaatatagcaaacgtttgagtaaaatattattgtttttgcctatataaaatgctactataaactcataaaaagaacagagaaatgggaaaaagtaacaaatgacacaaacaagaagtggaggtaaaacatgaaggtaaagaaaatggtagcattggcattaacaacagctatgtgtgcagggctggcgacacagccggtaatggcagatgatggttattctctgactgtttccggaattggaggaagtttaaactggcttccagtatacattgcacaacaggaaggctggtttgaagaagaaaatcttgaaatagaagaggttctctttactaatggaccggttcagatggagtcactttcctcagacggatgggacatcggatgcacaggtgtgggcggagtaattgctggcgtacttggatatgatgcaaaaattcttggggctagtaatacagatgatggaactcaatatgtatttgcaagaagtgattcagatattgtaaaagctggacagggaaacaacagcataaacgaagaaatctatggtgatgcggaaacatggaaaggaaaatctattttatgtaatacaggaagtgtaacgcagtatgttctgattaaaatgctggaaggttttggactgacacaaaatgacgtagaatttatcgcaatggatccggcaacagcttatagtgcatttctggctggagaaggcgatgcatgtgtgcttacaggcagcggcggtacatttaaaatgctggagaatacagaagagtatacagcagtagcaagtggtcctctggttgattcgggcctgatgtgtaactttgttgcaaacaaaaacagttatgaggatgaagaaaaatatgaagcaatgaaagcttttatgaaagtttacttcaaaactcttgactggatggcagaaaataccgaagaagttgtacagtactgcgtagatatgaacgatgaaaatggaagttctatggaaccggaaattgtagaaaaatacgtgcaggcagataaatattatacattagatgaagcggtacagatgatggaaacaaaagcagaaggctcagaatactccgagatggaaagtaatttgatggatgtattggacttctttatcagtgtaggaaactatatggaaggtgatgatgaaaaatttgccggacatgttgacagtacccttctgaaagaagtacttgatgagtcaaaatagaagataaaaggagacagctgaatgaataaggataaacaaaatctggaagatcagctgcagctctggcgtcagaataaaaagaaagaaaacttaaagtatgttctgttgagtgcagcaggcatactttctgttttggtaatctggcagctggctgttgtgctgggattagtaaatgagagactgcttcctgcgcctactcgtattctgaatactttgatttttaaaataaataataaagctcctgatggaaatatgttgggagtaaacattatggcatctcttcaggttgccctttcaggttttcttgcggcaattgtaataggggttcccctgggacttcttatggggtggtggacttatgcagaccgttttattagacccatttttgaattgattcgtcccgtgccgcctatagcctggattcctctggttgttgtatggatgggagtaggattaaaggcaaaagcgttaattattttttttacagcatttgttccctgcgttattaattcttatacaggcatcaagcttacaagccaaactttgattgatgtatccagaacttttggagctcctaattatgaaatattttggaaggtaggggttccttcttctcttccaatggtatttgcgggaatcagagttgcgcttggaaattcatggtcaacgttggttgcagcagaaatgctggcagcgagtgcaggtcttggatatatgattcaaattggaagaacagttgcacgccctgatattgtaattgtaggtatggttgtaattggagctatcggagcatttttatcaatgcttctgtcaagggctgagaaatatttccttcgctggaaaataaatcgttaggagggtaaggagatggatcagaaaacaacaaaacaaaaggctgtccatagcatcctatattggggcctccctgtactggctgttgttcttattgccgtaggctggatatccttttccgcatttaatccggagttaatgccttctccggctcaggtctgggagcgtttggtaaaaacttttacaaagcctattgcaaaaacgacactatttggtcatgcatgggcaagcttaagaagagttcttctggcacttctggtgtcatgggtttttggcatagcttttggaattctaattgggtggaataaaaaggccagagcattttttggaagtatctttgaggtgattcgtccgattcctccaattgcctggattccaattgtgatcatgtggtttggaattggtgagtttccaaaaatcctgcttgtttttattggtacttttgtacctcttgtaattaatacatcaacaggaatcgagatggttgacagaataaatatacaggtaggtcaaatatttggagggaaaaatcgacaaattttaaaagaaattgtaattcctacagcacttccttctatttttgcaggaattcgtacatctgtaagctccggatggacaacagttctggctgcagaaatgctcggagcaaatgccggtctgggatctttggtaacaagaggctggcagggaagtgacttatcgttagtaatggtttctgtaattacaattgcaattatcggagcattattatctacgattttgcagaaacttgagaaggtggtgtgtccatggaacaattaaataaaagaatggaggtcaggaatctttctaaaactttttttggaaagaaaggatattttacagcaatcgaggacgtaagtctggatgtttatgatggagaattccttgtaatacttggaccgggaagatgtggaaaaacagtacttttaaatattatgtcaggtttggaagaacagacggaaggccagattatatataatggacaggaatggaaaggtttgaatcctgagatagggatggttttccagaaactggcgctgatgccttttaaaacagttattgagaatgtggagcttgctcttaaatttcggggaatggaaaaggaaaagaggagagagattgcaaaacattatatagaactggtaggacttaaaggatttgaagaatattatcctaagcaactttctggtggcatgcagcagcgtgttggaattgcaagagcttatgctgcggatccaaagcttttgattatggatgagccctttggaaaactggatgcgcagacaagatatcagatgcaggaagaccttttgaaaatatgggaaaaggaaaagaggacgattatttttgttacaaataacattgaggaggcgtgctatcttggagacaggatcattcttctcagtgattgtccgaccaaggtgaaaaaagtatatcccattgacatttccagacctagagacatggtaagtaaggaattcctggatctcaggacagtaatttctgacaatacggatttatcaatttagagggaggagattatgccaaacgaagatacaagaccgattaaagtcgaagtaaaaaatcttacaaaaaaattcggagatcttttggttctggatgatatgtcatttcatatccgcaaaggagaatttgtatgtgtagtaggtccaactggatgcggaaaaagtacatttttgaactgtttgaccaggatacatatgcctacctccggtgatctgtatattgatggagttccagcagatccgaaaaagcataatatttcgtttgtttttcaggagccaagtgctcttccgtggctgactgttgaggataacattgcttatggattaaaaataaaaaagcttccaaaggaggaaattaaaaaaagggttgatcaaattttagacttgatgggacttcaggaatttcgtaaatcttatcccggagaattatccgtatctgcagaacagcgtattattatcggccgttcctttgccatgcagccggatcttcttcttatggatgaaccctatgggcagatggatgttaaaatgcgcttttatttggaagacgaagtgattcgtctctggaaagagcttggaagtacagttatttttattacgcacaacatcgaagaggcagtttatctggcagaaaaagttatgatacttacaaataaaccggcaaagattaaagaagaagttaaaattgagcttccaagacccagagacataacagatccaaaatttattgagtacagaaattatatcacagataaaattaaatggtggtaaaaggatgatgagcatatgcagaaacagaggctaaagaataaaatcgctctggtaacaggggcggccagaggcattggatttggaatcgctgaaaaatatgtagaagaaggcgccaaagtggttattgcagatgttctggaaaccgaaggatctaatgctgcaaaaaagctaggaacagcagccggattttatcagattgatttgagaagcagaagttctatttttcagatggcagacagaattcacgaagaatatggtcatattgatgtgcttgtaaattgtgcaggtattgcaaggccgtgtcctaccatgaaactttcagaggaggttttggatgaagtaattgatattaatatgaaagctccgcttttcgcttgccaggcagttggaaaatatatgaggaaagatgggggcggaagtattattaatatttcatctggaaatacaaggatgattaatgtaggaaggactccttatggaatcaccaaaggggctgtaaatctccttacgcaacagctgggagctgaatgggccttatataatattaaggtaaatgcaattgcacctggatggattaaaacagaaatggtagaaaaaccattaagacaaggaatccttaatcaggaagagattctttcagtatctcctattggaagattcgggaaggtagcagaggttgcaaatcttgcctgttttctcgcaagtgaggaatctgattatattgtaggacagattatttttgctgatggtggatggaatacaggaattatgccaaacgcattgaattatattcgtgaaaatgataaggagcttcctgtataattcaagtatagggaattccgagaaagaaggttgagaaaaaaatacctcagagtaaaataagattactgactttgccggttagtaaaaatcttattgaacagagaggtatctgaaatgaattataacacacagaacgcaaaaattgcatccattactgaaaaaactttgattgttggtattgatgtcggaagcgaaactcattacgctagggcttttgactggagaaattatgagtatagcaaaaagccgctggagttcagtaacacggaatccggattcctgactttgaaagcgtggatggaagatatcgcagaaaaacatggcaaaactgctgtgattcccggaatggagccgaccggtcattactggtttgcgttagggaaattcctgcaggacagcggaatgaagccggtacatgtgaatccccatcatgtcaagaaatcgaaggaactggacgacaacaaccccaacaagaatgaccgcaaagatcccaaaacaattgcggcactggtcaatgagggacgtttttcctatccatatatacccaccggcatttatgcagaaatcaggagcctttcgaacctgcgtttccagacgcaggaagaactcacaaggatcaagaatcggattgcaagatggttttccatctacttcccggaatataaagatgtctacgtggatttgaaagcggtcagcggaagaatggtgttgaaggcagctccgctgccggaggatatcgtaaagcttggggcagaaggtgtgaaccagatctggagaaatgcgaagctgagaggcgctggaatgaagagggcaaagaccctggtatccgttgcagagcatagcattgggagtaaggaagcgccggaagcagcgagaatcgaattaaaaaatctgctgaatgacatggatgtatatgcagcaaggctggaggaactgctccggagtatagaagaaaaactaaaggagatcccatatattgataagctgatggcaatcaaagggatcggattggttacagtcagtggttttattgcagaagttggggacattggacgttttgataatcccaaacaactgcagaaactggcgggatatgcgatcgtggcgaatgattccggtaagcataacggagaaagtcggatcagctaccgcgggcgaaagcgcctgagatatgtgctgtatgaggcagcgatatcgctgattggaaagaatgcggagttccgggaaatacatgagtattatcggggccgaaaggaaaatccgctgaaaaagatgcagtcagtggtagcgatagcctgcaaggttataagggtattctacgcgatcctcacaaaaggtgtagattatgatgcggagaaactgataggagatatcagaagaccgtagatgcaggcagcataacaaccagagacaaaacaggtaatgttcctgctacagttgaattgagcctttagaaaacaaatctgagagttgaattcagctgtagcaggaaagctgaaaggtatgaggaacaggccggagaaacgtccaccgcaaggtgctggtttgtggagcatacagaataggtcagtaaaacttaagacaaagagtgagccagtagtcggcaggaatattttccatagggcaagaccctgacaaggagctaagctgacaccctggttatggacaggcgggacgaaggaagttagggccctgcagaaatgcgggagatcctggtagacacgggaggttcgctgccgtagatggatgggtatacacaaggccatgtaaaacagaaaaccaagacgttttacttcgtgtacccaaaaccagctattttcgtaccggatacagagaaatgcccataccaatggctctttcttctgagatatttattgatagtatatcgaaaaaaccttgattttcaaggaaaaaagacttgacttaatagggaggaagaataatttatgaaagtattatgtattgaaaaaccagaaaaacttgagatcaaagatcttccgaagccagagctggttcctggtcaggctgttataaaaatggagatgtgcggaatctgtggatctgatgtaacagcatacagaggtgtaaatcctacaatgaagtatccgatcaatggactgggacatgaaggtgtgggaattattgaagctatcggtgaaaatgataaaggattgaaagtaggagaccgtgtagctttggaaccatacgttccctgtaacaaatgtcatatgtgtgcagaagagcgctttaataattgtgcagatattcatgtatgtggagtacataaagacggaatgatggcagaatattttttgcatccggtacagcttctttataaattacctgatgatcttacctttaaacatgctgcgttagtagaaccatttacaattggacttcatgcagcaacacgtgcaagagtgaaaagtggagaaaaagttgttatttttggagctggcgtaattggtcttatggcagcatatgcctgtattaattatggcgcatttccaattcttatagatgtgattcaggaaagactggattatgcgaaggaacgtggaataccttatatttttaattcaaaagaaggtgggatagaggaatatctgaaggaggttacagagggtaaattgccagaggctatgattgactgtacaggcgcaccagtgattttggaacaaatgcataattacgtatgtcatggtgcaagaattgctcttgtaggctggccgcataatcctgtagctattaatacagtgcgtttgatgcaaaaagagattgatatctgtccttccagaaattcgaataagaaatttccagaagcaatcaaactgattcatgagaataaaattccgacagatgcatttattaccaaaatgatcaggttagatgaagtagagacaaccattcaggatatgatcaaaaagccttcagattacctgaaggtaattgttgagatttaataaaatggaggaggaaccgatatgctgacaactagctttgaaatgatggataaggcatacaaaaatgggtacgctgttccggcaattaatacacaaggtggcacatatgatattattcgtgcaatttgtatggcagcggaagagctgaattcacctgtaattttagcccattatgtgaatacaggttcatattcaggacatgactggttttttgaaactgccaaatggatggcagaaaaggtatctgtaccagtagcgattcatcttgatcatggtgatagttttgaacggtgtatggaaatgctgcatatcggatttacttctattatgtatgatggatcagcgttttctgtagaggaaaatgcaaaaagaacagaagaggttgccagggtttgtagagcatttggagtacctttagaagcagagataggagagctggcaagattagatgatcagggacatcagaatggactttccaatattgcggatccggatatagtaaaaaaatatctggagctctgcagaccagattctttggctatcgggataggtaatgctcatggattctataaaggacctgttgatattcatgtggatattctggagaaatgcagagagttcacagatattccttttgtactccatggatgtacgggaatggacgagacattgattcggcaggctgtcaaagcaggtgtggcaaaaatcaattttggtacacaagtgcgttgtaattatatcaattatgtaaaagatggtttagcgcagggaaaagatgagggacatgcatggaagctttcttcttatacagagaagcgtttgagagaagacattaaggatattatccgtctggcaggttcggcgggaaaggcctgacagttctgtgtccttaaaggatacagaactgcatggtatatttttttgagtcatcaggattaagcttctgcagatgatttttatgaagaaattcattatcttcatcagaacatattgcagatccattccatggttcaatgcatatgtaatgtgcatttttagataagctggtccaaaatgctacagtctcaaaatctggaaagaatgtagcaagtccatgaccagttttgggattgataagcgagagttcttttgatgagaggcggtcaaaccagattgcatcatggagaaatagttcccgggaaagaggaatttcaatttgatttccgggaaaaggatattcgtgtgacatgtcgaattcctgtttttttgtatcgtatcttcgatatccgaaattttgttttcgcccaaaacgaagaatatagtcttcgaaagtttctccctcatggagtggacagcaaattcccggatggagtccaatacaataaaaaatgggtttttcagaggaattggacagttcaagtgtcagatccagagtttgattttgcagagtgtagtgtacaataaggtgaaatggatagggataacaatctgtcggaaaatctttttctgttatttcaaaagatgcagtagattccgttattgctttcatatgaaactctgttgttttacagggaccgtgtttaggtatttcataagcacatccgttaatgatagttttattattccgacagtttccgacaataggaaaaaggataggagaacagttcttccatatatctggatttcgctgccatatatattcagtatttttattatctttaagtgagatgagctgtgctcccatggtatcaattgttgcagatacattgttgtttttaatagtaataagcataaaaatccctccttatcaggtatttagataaattaagtatatagtttgaacatgatagttttcaatgaaatatgattcaaacgtttgcgttgacagttgtaatgggggattggaaaggcggtaaaaaaatggcattagtttctttaaaaccagttctcgacgcagccgttaaatatggatatggtcagggtgcgtttaatgtaaatgcagttgctcaggcaaaggcggtaattgaagtccatgaaatgtttcgatctcctgcaatacttcagggtgcagatctggctaacggttttatgggcggctgtaccgattttgtcaatgctacactggaagataaaaaaagaggagcaaaacgaattgctgatgcagtaaaaaaatatggagaaaattcaactattccagttgtcctgcatctggatcatggaagagattttgattcctgtaaagcggctattgatggaggctatacctctgttatgattgacggttcttctctttcctttgacgaaaatgtagaactgaccagagaggttgtaaaatatgcacatagagaaggcgtcagtgttgaaggcgagttaggtgtgcttgccggagtagaggatcatgttttttctgataactccacttatacaaatccaatgaaatcaattgagttctttaagaaaacaggtgtagatgcgctggcaatttcctatggaactatgcatggtgcatcaaagggaaagaatgtaaaacttcgccgtcagattccaatcgcaatcagagagtgtatgaatcatgaaggaattgagggcggactggtatcacatgggtcttccacggttccagactatatcgtagaagagatcaacgctatgggcggacatcttaagaatgcttatggaatttctatcgttgaattgaaggaagctatttcatgtggtatcaacaagatcaacgtagatacagacattcgtctggctgtcaccagaaacatgaaagaactattcagggatcatgaagaactgaggcgaagtgattctattggagaaatataccaccttctggaagcaaacaaggataaatttgatccacgtgtattccttccaccaattatggatacagtgatgtttggacagatcccggatgaggatacagcaaaaattgtaagctgtgtagaacggggtgtgaaggaagttgtaggaacacttattgttcagtttggttcttatggaaaagcaccgtttgtagatgtgaaaaccctagaagagatgaaggagttttataaaagaaaatgaaaaataatgtattagttgttcatgggggcggtccaacttctgttatgaatgcttctctttatggggttttgaaagaagcagagagacattcacaaattggagctgtatatggtgcaattggtggtgtagaaggcattttaaaagaaaaccttttaaatttaagtgaatttcaaggagcaaaagagctcttgctacatacaccaggaagtgctattggttcttccagatatccggtaacagaagaagactataataagactccgattattcttaaaaaatataatataaaatacattttaccaaatggtggaaatggaaccatggatacttgcggtaaaatttacaaatcgtgtatagaagctggatatactgatattaaggttgtaggaattcctaaaactattgacaatgatattgccattacagatcatactccgggatttggaagtgctgccagatatttggcggcgacagtgcgtgaggtggcagaagatgtgaaatctcttcctattcatgtatgtattatagaggctctgggtagaaatgccggatggattacggcagcctcggttttggcaaggaggaaaaaaggagatgctccgcatcttatttatactccagagcggccttttaaagaagaagaatttttgactgatgtaaagaagctttatgacaaattaggcggcgttgtagttgttgtcagtgaaggtcttaagaaagaggatggaactccggtagtagatccgatttataagacagaccgtgctgtatattatggggatgtaagtgcgcatctggctaatcttgtaattaaacgtctgggaatcaaggccaggaatgaaaagccaggactttgtggaagagcatctattgcctggcagtctcctgtagattgtcaggaagcacagttggcaggggaaaaggcgctggaggcagcaatcaaaggccatactggcgtaatgattggttttaaacgtgaaaaaacagaagacggatcctacaagattggtattatagaaattcctattgagaaggtaatgcttttggaaaaaacgcttccggatgagtatattaatgtccgtggaaatgatattacagaagaatatataaaatggctgcaaccactggttggtccgaaatttgaggaatttcttgattttaaggagtattacaaggagaaggaataatgaagcatatttttttaaatctgaagagatttgacattccaaaacaaatgggtggggtgaacagtattgcagatattgataattggggagcatacatagtaaaaaatactgaggaaaagctacagacatataaaaaagatcaggttgattttactattttttttccagagctacatattttggaagctaatgctgcacgcaaaattggttcacctatacaaataggatgccaaggggtacttcgcacagatgtatatcctggtggtaattttggcgcatttacggctggaagaccagcagcagcaatgaaagcagcaggttgtgatgctgtgattatcgggcattgtgaagaaagaaactttttgaataatgttttgagtgaagcggggattacagatgcagatgcaataaacagaattcttaatgaagaaataaaagctgcagtacgaagaggaatgaaagtcttgtattgtattggagaaaagagtgaagaacaggagcactggcagaatgtattgggaaggcagcttgaacttggacttaaggatgtagatcattctatggtaatagtggcatatgaacctgtgtggtctattggaccgggaaaaatgcctgcgggaaaagaatatattactatggtggctcgttttataaaagaaaaaacaggaggcatggatattgtttatggtggaggcctgaagcaggataatgccgaaatgcttgcatctattaaagaaattgacggaggcctgattgctcttaccagatttacagaagaaataggattttatccggaagaatatttagaaattattaatatatatatgaatgcagttctgggacaggaggtagtaaaatgagattagaatttgaatatggacatggaactatggaagcgcagcttccggatagtacagatatttttataccaggtgaaacagttaaggatccggattatataccagaggataaactggaagaggcatatctgaacagtcttgctgatcccattggaatgccccgattatcagagctggcacataaaggaactaccgttactattattgtgccggacagagtaaaaggcggtgagcagcctacaagccacagaaaattaagtattaaatatattcttaacgaactttataatgcaggtgttgataaaaaggatattctttttattatttctaatggacttcatcccagaagtacagaaacagatgctaaggcaatttttggtcctgaattatttaatgaattctggcatacagggcagattatcagtcatgacagtgaagaccaagagcatatgattgatctgggagctaccagaaggggagatcctgtattcatgaataagtatgtatttgacagtgatcttcctattttaatcggtcatgttcagggaaatccttatggaggttattcaggcggctataaacacagtgctacaggaattacaaattggagaagtattgccagtcaccatgttccggctgtgatgcatcgcccagattttaccccggtaaacgggggaagccttatgagaaacaagtttgatgaaataagtatgcatatggaagagaaaatgggacatccatttttctgctgtgatgctgttctggatacgaactccagacagattgccatttattctggatatgcaaaagaaatgatgccattaagctggaaagttgctgataaaagaacatatgtgcattgggcggaaaagaaatatgatgttcttgtatttggtatgccacaaaagttccattatggtgatggaatgggtaccaatcctattatgatgatgcaagctttgagtgcacaggtacttcggtttaaacgcattatgagtgatcactgtgtgattatctgttcttctctgtgcaatggatttttccatgacgaaagatggccttaccttaaagaaatgtatgatctttttcaacatgattatatgaatactcttccagatatcaatcgttatggggaatattttgcaacaaaccaggaatacataaggaaatatcgttttacaaatgcatttcatccatttcacggtttcagtatgatttcctgtgggcatattgcagaaatgaataccagcgctatttatattgttggagctcaggaacctggatatgcaagaggaatggggctgaaaacaagggcaacatttgaggaggcccttgaagatgcaaagaaaaaatttgtgggagataatcccaatattttggctctgccattgacttttaaaaaggcatcagtccatctttgtatgaagaatccaaaagatgactgcatggatgagtatggacattgtcatccatgtatgggatgaacagggtaggagaaaggatcttgtgtgatgaatcaggcagaagataataaattagaacagatgtctgcagtgcaaatttactggcagttatttaaaaatatttttatactgagttcatgcacctttggtgggggatttgttatcattggtatggtgaagaaaacctttgtagaaaagcttcgctggatatccgaagaagaaatgctggatatgaccgcaatagcacaatcagctccaggagcgctgggagtcaatattgccattgtcacaggataccgcatccggggaatcatgggagcactgacaggagcgtttgcagcagtgctccctcctcttattattatttcggtgatttcagtgttttataaccaatttaaggataataatgtgattgctataatgttacaggttatgcgtgctggagttgccgcagtaatttgtgatgttgtttttacattggtagcaaatatttttaagacaaaaaatattctgtggattatagttatggcagcagcgtttatgacaactgtattttggaatgtcagtgcggttattattattctgatttgtggagtgattggatatgtatacagcctgataacagaaaggagaaaagaggcaaaatgatatatttaaagctgttttgggccttttttcaaattgggctttttagttttggaggaggatatgctgcggttccgttaatccagagtcagatcgtagaaacgaatcattggctggagatggggcagtttgcggatcttattacaattgcagaaatgactcccggtccgatagccgtgaatagtgctacatttgtaggccaacagattgccgggttgacaggtgctgttgtatgtacacttggctgtatttttccatcacttattattgtacttctattgtcctggttatatatgaagtatcgtaatctgaaaacagtacagggaattcttactggcttacgtcctgcgattgtagcgatgataggttcagctggtttatcacttttatttctggccttatttaattcttctttagatggggtggtgtttgccgattttcgtattatagagggtattttatttattgtaagtatgtttcttttacgaagatataggataaatccgattataattatttttggctcaggtatttttggaacgatattttatatgcttcaataactaatatatcttgagtttccgcagttttatccacagtcacctgttttgtaatatatcattataaacaacttttaaaaaatgcctaaaatataaggaatcttctccctttttgatgtaaaattaagctaccaaccaaaaatcttactaaacaaaaagaaaggggattccttatgtctcattttacatcaaacacttacattttgaaacgaaaaattttaacttttacaaagaaattttcaagaaaactttcaaagcctgaaagaaaatttacagctgacattacctatggtatgctggcttccggaagttgcctgttaacggatgtctgtgatcagcttcacgaaccttccaaaaagataaacgttgttgatcgtttatctagacaccttgaaaaaggtgtgtctgcatccgctgcttccgcttacctacaacaagttaaaaaatggagttcttctgaacctatcatttacattgatgacagtgatgttgttaagccggatggctataaatttgaatcacttggaattgtccgcgatggttcagaaagtacatccactaaaagcgtttataaaaaaggttatcatgtaaccgaggcttgcattcttacttccgccaatcatcctgttagtattttttctaaaatacattcgtctcatgaaaaagactataaatctgcaaatacaattactttccaagcaattgaacagggaaactctctctttggcaaagccacttttgtcatggacagaggctacgatgacaataagatgtttctgaagttggatgaactcggacaagattatgtgatccgtttaaagtctaatcgtaagcttttgtaccataacaaatggacaaaggctacagaacttcgtaatcgcaggaaagggaaggtgaaaacaaatgttttttacaagggcaaaaaccatgaagcctacctttcacatgtcaaagtacagattactgcatccagaaaggacatttttcttgtgcttgtttacggcattaccgaacatccgatgatgcttgttactaataaagaaatcaaatcgaaagatgatataatccgggtggcaaggacttacttttcccgctggaaaatcgaagaatatttccgctgtaaaaagcagatgttccagttcgagaactttcgtgtgcgtaagctgaaggcaatcaacgcgcttaatttttatatcaccttatgcatggcatttcttgcaatgatttcaatggaatcagagaccaatgcccttaaggtttccatcataaaggcagcaaatcctgtaaaggaaaaagtttttttctgctattaccggctggcaaaaggcatctcaggcatactttcttatgcaaaagagggcgtcaggctttggttccggacaaaacgtccggcataccgtcaactctgccttaagctagccgcttaaatagataaaagaatagttctcccaaaagtccggttctgacagggcttattaaagtgtctctattcacggaactgcctttcttaaaatttcaaaaatcggcagattgacactttaggagattctattcattttgaaattacattttgcggaaactcaagctaatatattttcagttattgcaaatctaataggtatttctgataaaataaaaattctgtagaataaattcagcatttatgatactctatgaaaaaactatcatagacgctgaaaggagtttacattatgcttcaggatgattacatactcagacagatacgggaaatggtacgtgcagtgatgaaaatgctgtttcaggtggatgcacaggagctgacacctgcggttattgaagatgagaacgaaagggctgaacttgaagagctgctagctttaacagaggaagggaagatagatgaggcagaaaatcagctttatgaaatgacctgtgacggagacagaagcaggctgaaaacagggctgctgttttattacagtctgaatggaaaaacggatgaatttctggaggagcataatttcagccgggaggaaatcatgacaggaatccaggatctggcagacagatatggattaagcgggattgcggaagccttccgcacagagatcctgtaaaaatatcagccacataaaatgtcgaaaaatgtaaaaaacttgcggtgaataaagaagaataaacattgaaataaaatatgcgaatatgctatgatatggaaacggaataaccgtgttacagggtggctgacctctattcttacatagaatgggggtggtgctgatgaaacattttgattttaaagaccttatggcttttggaatgttcattcttgcattgctgacattcgtttttacgttctgtcgataatgatttaaagcatagaaagaccaccctcagaactttggcgagtttagggtggcattttctgtgtacgcttttaaacaggtcaaccccttgtgggcggttattcctttaaatatattatagagcagaaaatggaataatgcaaatgatttttggaagcctggaaacaagggtacgaaccgattactgttcgcgaccttcacagcaacgagccaaaattcatttaagattgcctgcggcaatgaaactttggcttgtatgtctcgggattttggcatatacatgccataacacctcgcgggatagagccgcgtgaacagtaatacaaaccgtacaaaacgatataatacaggttgtaaaaataaatcacagataaggaatttgatatatgcagttttatatggcacctatggaggggatcaccggatatatttaccggaaagcgtatcataaatgttttgggaatatggatcgttattttgccccgtttattatgagcaggcgtttgaatcagaaggaaatcagagatattcttccggaaaataatgaaggaatggaactgattcctcagatccttacaaacagggcagaggattttcttgcgattgcaaaagaaatcagacagtatggatatgataaggtgaatctgaatctgggctgtccttctcccacagttacatcaagaaacagaggctccggcttcctggcgcttccgaaggaactggaccgctttctggaagaaatttttgagtcctgtccaatgactgtttccataaaaacaagaattggagtggaggatgaggaggagtggcctcagcttctggaaatttttgaaaaatatcctctggaggagcttatcatacatcccaggctgaaaacagatcagtacaagaagaatacgattcactgggaggcttttaaaaaagcggaggaaagcagcaggcattcgctttgctataatggggatattgtatgcaaagaagattatgaaaaagttgtacagaggtttcccggtacggaaaaggttatgatcggaagaggaattctgaaaaaaccgtggctggcagaggaaatccgcaatggagacaaaaaagacagcagccggtataaagaggaactttttggatttcatgaggagcttttaaaaggatatatggattatatgtcaggagacaggaacaccctgtataaaatgaaggagctttgggcatatcttggaacctcatttacaaatccggagcgttatatgaaaaaaatccgaaagtctcagcatatcagtgaatacaggatatgggtcggaaatctgttccgggagcaggatttgatttaaagtgcctcattcccctcatctgttatgaaaggggaatgaggtattttatatagttttggagtttttacagctccaggatcacagcctgataattctttaaatgcaggatattttcggaaatatctgcttccggataattgttcagcagtacttttttgcactggcccggaaggggaatatcctgaggttctgtctggaagtttccaagaatcagcagtgttttttcaccctttcggaaatacgccatcaggttatgctgatcttccagataagggatcaggtcgccgtagacaatggtttctttatagtcaggatttttgcgaagagcagtcagttttttataaaaagacagcagagaatcaggatcgttcagctgtgattttacgttgatttcacggtaattcgggttcacggaaagccacggggtaccggaggtaaaaccggcattttccgtgcagtcccactgcattggtgtacgtgcattatcccggctgtaaatggaaatgcatttcagtgcttcttctctggtacagcctgcattcagcgccacatggtattcgtcaatggtgctgatatcatcaatctgatcaatagaggaaaacttcatattttccattccgatttcctgtccctgataaataaagggcagacccttaagcataaaatacatgacagcaagcatttttttgctgtaaatgcttacttcaccctctggaatataatggctgacacctcttggttcatcatgattttcaataatatttgagaggaatccgatatctcccacacgcttctgagagtggaagcagcagcgtttataatcatcaggagtgattgctttacggtcgtaccagcccttgctgcttgcgccgaaaacaacaggagcaaagtcaaacatactggaaaaatatccgttatctccaatgaaatcagggagctcttcatccttttcattaaagacttcacctacggaaaaagcctcatgcggaccaaaggtacggtccctcatttctcccagaaattctcctacaccccgggcctctgcaagcatattgtcaaccgtgcaaagtccgtctgcccggtcagaagcataatctttataggggagttttttcttaatattgataatggcatcgatgcggaagccgctgagaccgcgatccagccaccagttgatatttttgtaaacttcttcccggacgtccgggttttcccagttaagatccggctgttttttatggaaaagatgcaggtactgtttgtcaggatgtccggggagaggctcccatacggaaccgccgaagtaactgcgccagttacagggtagctgtccttcttttcggtcctcaatgtagaagaaattgctgtattttccctcgggatctgcacaggctttttcaaaccattcatgctcgtcagagcaatgattgacaacaagatccagaagaatgtacatgtcttttttccgggcttcagtaagaagtctgtccatgtcatccagggtaccgaaagcgggatgaatattgtaataatctgaaatatcataaccctgatctgccattggggaaggatagcagggtgaaatccatacaatgtccactccaagttctttcagatagtcaagctttgatataatacccggaatatctccgattccgtcgccattggaatcaaaaaagctttttgggtaaatctgataggcaaccttatcgtgccaccatttacgtttcataatcgtcctcctcagttcatgcgaatacttattgccgaaagccattaggcttgtggcggccttattttagtatgggatttattataaggcatgggttggaaaaatgcactggtcattctgtcaaaattttgtgttatacaagtcagaattttacggttgcagacaatctgttactgtccatacgtcactatcctgcgaggtgttttggcatatatatgccaaaagtccgagacatacagctatcatcgagggtagtttggaatgcattttgaccaggttgctgtgaaggtcgtaaacagtaatgacaatttgaaataatccgtcgaaacagagggttttctattgacaaacagtgatatttgtcataaagttttctatgacaaacaataaagactatgaaatgaaaagaggaacagtcagatgacgttaaaagatctgccgatcggaaagacggcaacaatacgttctgtaggcggagaaggcgctctcagacagcatttcctggatatggggctgatcccaaagggagatgtgactatggtgaagtatgctcctatgggagatcccatggaacttcgtatccacagctatgagcttacacttcgtcttgctgatgcggataaaattgaaatagaaaatgtaagggacgcaggagaaaagggagagacatcaaagaaaaacaacagccattccatccctcatccgggattgggagaaggcggaaaatttcattttaaggaaacggaaaatccccttccggacagtgaaatgcttacctttgcactggcaggaaaccagaactgcggaaagacaactttgtttaatcagcttaccggctccagccagcatgtgggaaatttcccaggtgttactgtggacagaaaggatggatcgatccgtggaaaaagcaataccctggtaacagatcttccgggaatttattccatgtctccgtattccagcgaagaaatcgtaacaaggaattttgtactgaatgagcatccaagaggtattattaatattgtggatgccacaaatattgagcggaacctttatcttaccatgcagctgatggagctggatattcccatggttcttgccctgaatatgatggatgaggtcagggaaaacggcggttcgatcattatcaaccggatggaggaaatgcttggaatccctgtagttcctatttccgcagcaaaaaatgagggaattgacgagctggtagcccatgctcttcatgtggcaaaatatcaggaaaagccggaaaaaatagacttttgtgatgcggatgatgacggaggagctgttcacagatgccttcacgccattatgcatctgatcgaagaccatgcacaggaagccgggattccggtacgctttgcagcagccaagcttgcagagggggatcagctgatccttgaaaaactgaagcttgaccagaatgaaaaagagatgctggagcatattgtaaagcagatggaaagtgagcggggactggaccgtgcggctgccattgcgcacatgcgatttgattttattgaaaaaatctgcgatgagacagtcattaagcccaaagagagcaaggagcatatcagaagtacaaagatagaccggatacttactggaaaatatacggcgatcccctgttttgtgggaattatggcccttgtgttttacctgaccttcggagtgatcggagcgttcctttccggtattcttgatatgggaattgaggctcttggcggagctattgatcagcttatggcagcggctcatgtaaacagtgtgcttcattctcttgtgatggacggcatttttaatggtgtgggaagtgtgctgagttttctccctgttattgtgaccctgttctttttcctgtctcttctggaggacagtggatatatggcaagggttgcctttgtaatggataagctgctgagaaagatcgggctttccggacggagcattgtgcctatgctgatcggattcggctgcactgtacccggagttatggccagcagaactcttccctcagagcgggacagaagaatgacaattcttcttacaccttttatgagctgctctgcaaagcttcccatttatgcattttttgcagcagcctttttcccggaaaacagcgcgctggttatgattcttctgtattttggcggcattgttatggggattctgatggcgcttctgctgcgccgtaccatgttcagcggagaggcggttccctttgttatggagcttccgaactaccgtatgccgggagcaaaaaacgtaggacatttgctgtgggataaggcgaaagactttttgcagagagcgtttaccgttatttttatcgctactcttgtaatctggtttttacagacctttgatatccatctgaatgttgtaacagattcaaaagacagtattcttgccatggcagcaagtgttgttgctccgattttccgacctatgggatttggagactggcggatatctacagctttgattaccggatttatggcaaaagaaagcgttgtttccacactttcagttctttttggaagtacggaagctctgcttgcagccatcacacctctggcagcagcaagccttttggtattttgcctgctttataccccatgtgtggcagcagttgccgctatcaagcgtgagctgggcggaaaatgggcggcaggtgttgtgatcggacagtgcgtgatcgcatggatcgcagcttttgtggtctacatgatcgcaggaatttttatctgataaaaataaaggatttgtgatttcctgaaagaaaaactgaataattgaaatgcaagacactgcggataagatataaatattctgcagtgtctttttatttttttcttgacattctttatttacaggattatactttgataatcaaaatattaaatattcaaaataaataacaacccaaacggaatcgtgatcaggttccgaaaaaaggagggcagatcatgaaaggtgtgatttgcggaactggcgcctgtgtgccggaaagagttctggataatcataaaatcgcagaatttgtggacaccagtgatcagtggatacgggaacgaaccggggtactcagaagacacattgcggaaaaagaaaccacagtgtctatgggggcggaagcagcccggcaggcaataaaggaatcaggcatcagttccgatgaagtggatctgatcatagcagcgacttccacaccggatcagatttttccatgcactgcgtgcgagatacagaagaaactggaactttatcaggcggcaggctttgatctgaatgcggcatgcagtggatttctgtttgcatatcagactgcgcaggcctacatatcgtcaggaatctataaaaacattcttgttgtgggaagcgaaagactttctcggatcgttgactggaaagaccggggaacctgtattcttttcggagacggggcgggggctgtgatgctgtgcgcccgggaaggcaggaattatgcttcctttgcccggtcagacggacggggcggagaggctctgacctgtccggcagtgaaaagcagtctgaatagggagccgcagacggaaacagccgggagcgcagccctgaaatcagagaagtatctgtttatggacggaagggaagtatttcagtttgctgtaagaagtgttccggaagcgatccgccgggtactggaaaaaaacaatttaaaaacagaagaaattgactggtttattcttcaccaggcaaaccgcaggatcgtagaagcagcagccaggagactgggaatgggaattgaaaggtttcccatgaatcttcaggaatatggcaatacttcctcggcaagtatccccatacttctccatgaaatgaaccggaacggaaagctgaaaaaaggccagaagcttgttctggcaggctttggggcagggctttcctggggggcatctgtactggaatggggtatttaaaaataaattcaaaaatcagagatatagcagaaaaggagattattatgttacagaaaattattgagatcacagcagaaacacttggagcagaagcagaaagcattacagagaacacttcttttacagaggatcttcatgcagattcccttgatctttttgagctggcaatggccctggaagaggaatttggagtagagattccaagcgaagatctggaaaaaataacaaccgtaggcgctgcggcagcatacctggaagagaataagtaaccttcgggctgatattttgcaaaacaaagaaatcataagagtatacaaaaatgcttgaaggctgtaagccgcagctttcaaaaccggtgatgattcagatgaggatttattatgaaaacaaaaattacagaattattgggaattgaatatcctgtgatccagggcggtatggcatgggtggctgaggccagtctggcggctgcagtgtcagacgcaggaggtcttggactgatcgcggctgccgcagcccctgcagagtgggtaagagagcagatcaaaaaggtgagagaaatgactgacagaccttttggagtcaacattatgctcatgagcccggaagcagatcaggtggcaaaagtcattgtggaagaaaaggttcccattgttacaacaggagccggaagcccggaaaaatatatggcagactggaaagcggcaggggtgaaggtgattccggtagtcgcctccactgctctggccagacgtatggagcgctgcggcgcagatgcagttgtggcagagggaacagaggccggaggacatatcggagagattactacaatgacactggtaccgcaggtggcggatgcagtggagattccggtgatcgctgccggaggcattgcagatggaagaggaatggcagcagcgtttatgttgggagcggaaggcgtgcaggtcggcactgcttttgcggcttcccgtgagtctgtgatccatcagaattataaagacagtatcttaagggcaaaggatattgatacccgtgttacaggacgcacaacgggtcatcctatccgggttttgcgcaatgacatgtccagaaaatatctggaaatggaaaaaagcggggctgattttgaggctcttgaagcacttacacttggaggcttaagaaaagcagtgcaggacggcgataccagaaacggaagtctgatggcaggccagagcgccggacttgtaaaggaaagtctttcctgcagggagattatcagcagaatggtttccagggctgaggatttaatgatcaggaagccatggcaggaataaatgttaaagagatttcgtaactgtccgcatgatactattctgtgaacaaaggaaacagtaaaaggattttttgcagagagcaggcggaacaggaacatgatatttaggaaatggagcggaacagtatgagcaggattgcatttctttatcccggacagggagcccaggaagtgggaatggcaggagatttttatgaaaaaagcgaggaggcaaaggctgtttttgatcaagcctccagtatactggattttgatgtccgggaaatctgttttcagaaaaatgacctcttggacaaaacagaatatactcaggcggctatggttacagcctgtcttgctattacccgtgaactggaaaaaagaggactttatccggaaatgacagcaggtttaagccttggtgaatactgtgcgattgcagcagcaggcagcatgagcgatatggatgcggtccgcactgtccgcgccagagggatatttatggaacatgcggctccggaaggaaccggagctatggccgctgttcttggaatggacggagaagcggtggaaagaactgttcatgattttcaaggtgtttttattgcaaattataactgtcccggacagattgtgatcacaggggaaaaggaagcagtggaacagtcggctgcagttcttaaagaagccggggccagaagggtacttcctttaaaggtcagcggtccttttcattctccaatgatgaaaccggcaggagaaaagctggaagaggttctgaaaaaggtttctgttaaggatccggacattccctatgtgacaaatgtgacagcggaagtggtgaagagcggggaagccataaaagaacttttggtgagacaggtaagctcttcggttcgctgggagcagagcatgagagcaatgatcgcgcagggaattgacacctttgtggagattggcccggggaaaaccctcagcggttttatgaaaaaaatagataaaaatgtaaatatgtaccggatcagtacctgggaagaagcggaaactgtatgcggggaactgctgaagcagtgatcggcagaatttccgaagggaacagaaccagcggaggagacatgtaacatccgaagggaacagaagcagaggagaggacatgtaacatccgaagggaacagaaacagcgggaaggacatgtaatttccgaggggaacagaaccagtggagggggacatgtaatttccgaaaggcatggaagcagtaatgcggtatgtataagcgctgggcgatttgtacagctatacaggaaaaagcatgcagaacaggtgagtttgaggacatatttattcagaataataaaacagacagtggatgattgcaggaaaggggaaacatggcggagtatacagaaaagcaggtagctgtagtaacaggcgcatccagaggaattggaagagcagttgctctggagctggcagcaaaaggaatttttgtgattattaattataacggttcagctgaccgggcagaaaaagtaaaaaaagaaattgaagaaaacggcggctgtgcagaagctttacagtggaatgttgcggattataaagcctgtgaacaggctgtcagagatattgtaaaaaaatacggaaaaataaatatccttgtaaataatgcaggaatcacaaaagacgggctcctgatggggatgtccagggaggactttgacagcgtagtcgatgtgaatctgggaggaacctttaacatgctgcgctttgtttccagacagatgctgagacagaaaagcggacgaattgtaaatatggcttctgtggtaggaattgccggaaatgcaggacaggcaaattatgcggcgtccaaagcaggtgtgatcggacttacaaagacagcggcaagagaactggcatccagaggaattacagtaaacgcagtggctccgggatttatagaaacagaaatgactcagatcctgcctgattctgtgaaagaggcttctgcggcacagattcccctggggcattttggaaagccggagaatgtagcgaagacagtggcatttcttgtatcagaagatgcttcttacattaccggacaggtcgttcaggttgacggaggaatggtaatatgagcaggcggagagtcgtaattacagggctgggagcagtgacgcccacaggaaacaatgtacaggagttctggcaggggatctgtgccggaaaggtgggaatcggatcgatcaccagatttgacgcccagggctataaggtaaagcttgcagctgaggtaaaaggctttgaacctaaaaagtatatggaacccaaacaggtaagacgtatggctcttttttctcagtatgcagttgcggcagccaaagaagcttttgaggattccgggctggatatgaaggaagaagatgctttccgggcgggagttatcattggttccggagttggagatctccgtcaggtggagctttgctatgacagaatcactcagaaaggacccggccgtgcgcttcctctgatggtgcctatgatgatctccaatatggctgcaggaaatgtttccattgagcttggcctgagaggaaaatgtacagacgtggtgactgcctgtgcgtcaggaacccacagcattggagatgcttttcgggcgatccagtacggagacgcggacattatggtggcaggaggcgcggaaagctgtatctgtcctacgggagttgcaggatttgacgcactgactgctcttacagaaacggacaaccctttaaaggcatctgttccatttgacaaagacagagacggatttgttcttggcgaaggcgcaggcattgtggtactggaggagctggagcatgccagggcaagaggagcgggaatttatgcagaggtagtcggttacggggctacagcggatgcatatcacattacctctcctgctgaggacggaagcggagccgcaaaggcaatgagccttgccatggaagaagcaggcgtatgtccggaggaagtggaatatatcaatgctcatggaacaagcactcatcataacgatctttttgaaacaagagccattcaccttgcctttggcgcagcggcggaaaaggttctggtaaactccacaaaatccatgatcggacatctgcttggcgcagcaggaggcgcagagcttgtcacctgtgtaaaggagcttcaggaaggctttatccaccagacaattggaaccgaaacaccgggagaaggctgcgatctgaattatgtacttggcgccccggtgaaaaaggaaatccgttacgctatgagcaattccctgggatttgggggacataacgccacactgttaataaaaaaattcgattaagcagaaaagaggtaatcctcaagaggatacctggatgctcagaaaccatgagcagaaaagaggtaatccataaaaggatacctggatgctcagaaacagtgagcaagaaagaggtaagtatggaatttgataatcttcttacgttgataaaggctgtgtcggactctgaactgacagaatttcagtatgaagaaaacggtaccacccttcgttttgtcagggaaacgccaaaaacagagcttgtccttccaatggagggaaccccgcagaatcagaatgtacaaagcgtaccgtctgttttaacacaaaacacagaaacccggcaggcgccggaagcagtaatggacggaaacggggaagcccgggaaggaaaactgataaaatctccccttgtgggaactttttatgcggctccttcagaagacgcagagccctttgtggcagtgggagacggagtgaaaaaaggaaaaactctgggaattgtggaagccatgaagctgatgaatgaaattgaaagtgaatatgagggaaccgtgacggaaattctggtggaaaacggccagatggtagagtacggacagccccttttcagaataaaataaaaagaggtgcagcatgaagcatttgggaattaaagaaattgaagagattcttcctcacagacatccgtttcttcttatagattacatagaggactatgagccgggagagtttgcggcaggatataaatgtgtgacctttcatgaggattttttcagaggtcattttcctcaggaaccggtgatgccgggtgttctgatcgtggaggctcttgcccagaccggcgcggtggctattttaagcaaagaggaaaacaggggaaaaactgcatatttcggcggaataaaaagctgccgcttccggggaaaggttgttccgggagataagctgaagcttgaaacgaagatcattaagtgcaaggggcctgtaggggtcggacatgcagttgccagcgtggacggaaaagttgttgcagatgcggaactgacctttatgatcgggtaggtggtaaatatgataaaaaaagtgctgatagcaaacagaggagagattgcagtgcggatcatccgtgcatgcagggaaatgggaattgagacagtggcagtttattcagaagctgacagggaagctctgcacacacagcttgcagatgaagctatctgtattggcccggcgccttcttctcagagctacctcagtatggaaaatatcataagtgcgaccattgtatcaggtgcggatgccgttcatccgggatttggatttctgtcagaaaacagcagatttgcagagctgtgcgagcagtgtcacattacttttatcgggcctccctctcatgtgatcgcaagtcttggcaataaacaggctgccaaaaataccatggctgcagccggtgttccggtgatcccgggaagcgagaaagcaatttatacagcagaggcaggatttgaagaagcagaaaaaatcggctatcctgtgattatcaaggctgctcttggaggcggcggaaaaggaatgagaactgcagattctccggatgattttgcagaaagcttccatacggctcagaaggaagctcagatggcgtttggcgacaataccatgtatgtggagcattttgtcaggaagcccagacatattgagtttcagattcttgcagatcagaagggaaatgtgatacatctgggagagagggactgttctgttcagagaaatcatcagaaaatgatcgaggagtctccctgtgagattatttcagataagctgcgcaaaaaaatgggagaggctgcagtaaaggctgcaaaggtctgcggctatgtgaatgccggaaccattgaattccttctggacagggacggaagcttttattttatggaaatgaatacccggatccaggtagaacatcctgttacagagtgggtcacaggggtggatcttgtaaaagaacaaatccgtattgcatccggacagcccctttcctacagacaaaaggatatccatattacaggtcatgccattgaatgcaggatcaatgcggaaaatccggaaaaaggcttccgtccttctcccggaaccattacagatatgtactttcccggaggcaagggaatccggatcgactctgcagtgtacagcggttatacagtccagccctattatgactctatgatcgcaaagctgatcgtgtgggcaaaaaacagggatgaggcgattcgtaaaatgcagagcgctcttggggagattatcatagaaggaatcgacacaaatgtagattatcagtatgaaattctgaatcatccggattttcttaccggaaatacagatgtggaatttattgaacgaatggaaggcagaggtaatggagcatgaagctggaaaatatgttcaaaaaaacaaaaagtctgtacagggaacagagcgtaaagcacaccggtactttgaagcctgaggttcctcagggacttctgcgcaaatgcaataagtgcggagcggcaatcgtcaccgaggatgtaaaaaacggaaactatatctgtccgaaatgcggcggatatttcaggatccatgcatatacaagaatccgtatgattacagacgagggaagcttcgaggaatgggacaaagatcttgttggcggaaatccaatggaataccggggctatgaagaaaagcttaattctgtaagggagaaaacagggcttcaggaagctgttgttacaggaaagggacgtatcaacggtcgggaagcagtgatcggtgtgtgcgacggccgtttttttatggcaagtatgggctgggctgtaggcgaaaaaattacaagagccgtggagcgtgccacccgggaacagcttccggtgattctttttgcctgttccggtggcgccagaatgcaggagggaattacttctcttatgcagatgtcaaaaacttcggcagcgctgaaaaagcacagtgacgcgggacttctttatatttctgttctgaccgagcctactacgggaggcgtcacagccagctttgccatgctgggagatgtgatactggcggagacgggagccctgatcggatttgcaggtcccagagtgatcgagcagacaattcgccagaagcttcccaaaggcttccagagagcagaatttctcctggagcatggatttttggacgaaatcgtggaacgggaaaatctgaaaagaaccctgacaaagcttttgaagcttcatggtagaaaaagaaagacagagggaactgatctgccgggctcagataaagtacaggagatcaataacagatcagcggcagaagtgaagctgtctgataacgtaggtacagccgacagagagaagcatattttttcacaggagacatcagactcattttgtgaaaaagagttttgccagaacagcaggacggaacatacggcatgggagcgtgttcagatttccaggaaactggagagaccttcgggcagcagctacattaagtcattgttcacggatttcatggagctgcacggagatcggaaatacggagacgatcctgcagtgatcggcgggattgctgcttttcacgggatgccggtaacagtgatcgttcaggaaaagggctgcgatacaaaggaaaacatacacagaaacttcggtatgcctatgccggaggggtatcggaaggcgctgcggctgatgaagcaggcggaaaaatttcgccgaccggtgatctgctttgtagacactccgggagctttctgtggtattgaggcagaagagagaggacagggagcagccattgcagacagcctcatggaactggccggcctgacggttccggtacttaccataattacaggtgagggaggaagcggaggggcgcttgctctggcagcaggagatcaggtatggatgcttgagaatgcagtctattccattctttcaccggaaggattttccagtattttatggaaggacagcacaaaggcaaaagaggcggcagaggtaatgaagctcactgcggctgatctttattctcagggaattattgagaaaatgatctgtgaaccagagggatacagtgaacagacactttatcaggtgacagatattctggacaaggaaataacagattttctggaagaatacagaaattattctgaagaagtacttctggaaaagcgatatgagagattcaggaagttctgagatctctgccgggggagaaccggggaagctccggcgatatgaaaagccggatgctatagaaatacacaggataagccgaaacgaaaagcggttttataacagatgatacagaggtctgctataaagctgctttttatttgctgttaaagcagggtattttgtaacaatctttccgggaaataaaattggtctgccaggttgtgaccggatccatgtgaaatagttaagaaaagttaagaacctgttaagacatactgtaagaaatatatgttatcttataaccatcttataagttaaaggggtactttatgagaataaaatcaatcgtccatgttgtggctgcatggatcatgctggttctgacatcggaattcagccttacagtagcttacgacatatgtgatacaaatccctgggcacgtattttgtatgtggcattgaatatttccagtctgttggctgctttttatttatataccagatatattatgaagataaaaatgcaggatcttcgattggggaaacctttcccggaaagaaaatggtgtattacagcagttattatgccgttggcaatatgctgcttttatcttctttttgtaaaaggaacttttgcttcacaaaatcttaaactgaaagatttgataaatgttctgaccctttctgttttatctcttggaattttgcctgcagttacagaggaaatggttttcaggggaatgatcttgagtaccttgcaaagtgcttttggaaagaaagcagcagtgtttatttcaagtattttatttgctttgtatcatttggagtatattgacagttcagattggaaaaaggttgttttgctgatcgtgtctgttggaattattggatatgctctttcgcttgttacacttcagtccggttccatatggtctgcagttgttatacatggaatgtataatgtcctgtcaggagagagccagatcctgcatattgatatggaacagaatttttcagctatgtggacctatacagtaagtacgaaaaacccattactgaccggaattaacggagcggttggctttaccgcggcgcttcctgcagtagttggctttatcgtgattataataatggtaaaatattatgagaaaaaggaaaagaaagcagcagaaaaagaataaaaggaaagagatcatctggtattctgtttttctgattgttattttgacaggaatatttataatttcagaaagagatgacagcctggtattgacagaaacaaaaaggaaccagataataaacagtaatgagtggaaagaaatatttgaacattcagatgtttatctctctgttcttctggaagatctgaaacgaaatccggaaatgttggattttgtgaaaaaatatccgggggaacagactgcacaggaagcagggcttacattcagagaaaaactgaagaaatacccgttgtttattcaatgggacgaaagatggggatatcggtcatatggacagagcaacattgggatatccggatgcggtcctacttgcatggcaatggtcatatacagtttgacgcgaaattctgatgcattgccggatattctggcacaagaggcaatgacaggcggatattacataatgggaactggaacagcctggtcttttatgaatgagtgtgcgtctgcgtatggggtaattgcttctcagtttgcttctctggaacagtgggaactgaaagaacggcttgaggatggaaatatgattatctgtgctatgggacctggggatttttctgcacagggacattttattgtaatctatgattatacatcggatggattttgtgtaaatgaccctttcagttatacgaacagttcaaaaaaatgggattatgcaacactttcttctcaatggcagcaaatatgggtgtatgcagcgtaaaacgcaggataagaggatacaatgaaaaatcatattttaattgtggaagatgatgaagcgatccgggagggcgtaagaattctgttggagggagaaggttatacagtgcaggaggcagaggatggattccagtgtctgaaaaagctttcagcagaaacagatctgattatactggatattatgatgcctggaatctccggtataaagacatgtgaagaaattcgaaaaacttctcatgttccggtattgtttctgactgctaaagggcaggaatcagacaaactgatcggtttgatggccggaggggacgactatctggtaaaaccgttttcttacgcggagcttctggcaagagtgaaagctcttcttcgcagatattgtgtttacagtcagccgctgaagacagagaaaaaaacagaacagtggctggaatatggcaagcttaaggtaaatacacagtataatgaggtttaccgtgagggagaggaaattcatctcagagaaatggaatacagactgcttttgctgatgatggaaaatccacagaagatttttctgtaaaaaatctgtatgagagtttatgggaggagccttttctgtattcttccgggaatacggttatggttcatatcaggagattgaggaccaaaatagaagaagatcctcagaagcctgaaatgatacagactgtgtggggaaaggggtatcgttttgggtagaatctataaagacagtctgactggaaaaatggtccggcgtttagtcagaggactgctggcaggtctgttcgttatgggacttttgtattttggaggaaagggctgcctgcagcagttcttttttaatacaggctatatttataaaagggagagccagagagcagaggaacttcagaattatgtggataaaaagtgtttaaaagctacagattataaacagttgaaacaatgggcggttcagagaaatattcgtgaatttacagtttccagagataagtggctgttgtttgatgtttcatatgatggtattctcactccgggaagcagagaaatcactgatttttcctggaaaatatttcacaaaataaaattcgcggatgggaatgcagatgtttatctttatgagggatttgcagataaatattatgatattctggcaggaatttctgtaattgtgggttttgttgtgtgtacaggtatattttcatatgaaatgcaggaggatttaaaatacattcagtgtctgaaagaagaagtagatgttatcagtaagggaaatctgcaggaacatgttacagtaacaggcaatgatgagctggctcagctgggagggggactggaaagaatgaggcagactctgatacaaaaagagcagtcagaacaggaactgcgggcggcacaggaaaaacttgttctgggaatgtctcatgaccttcgtacacctttaacaggactgatgacctatctggaaattcttaaaaaacagcagaaaaacagaattgttacagatgaatatattcaaaagtctctggataaggtgattcagataaggaatttgtcagaccagatgtttgaatatttttttgttaattcacagcataaggttgaattggaagaacctgaagacatattcagtgcatttggagattatctttctgaattatgtgttttgctggaagatgaaggatttacagtagatacggaaatgcttgaatggaatcctgctgctgtgcgaataaatacagatttatttggaagaatcatgaataatattatttccaatattgaaaagtatgccagcagaaataatcccatccaggtacagattctttatgaagaaaattacactggtattttgatcagaaatacagttgctcagacagagcagacagcccataaaacgggtatcgggttacagaatatatctgttatgatggaacatatgcagggatatttggaagtcttacagaaggacaggaaatattgcatgattttgcattttccgtattctgttatacagaagcatggaaacgacaaaggactgactgaatgataaatgctcatttgacaaatttattttttctaaggcttatttaaacttcttcttataaactgtccccatcgaaacaaaaacaacattcaaaaacagaaaggattttttatatgaagagaaaatatgcagcaatcgtacttggtcttaccatgactttaaccacagcaaacatcagcgcagtaaacattatggctgccactgccagtaccgcggaagagaaacaaacaaaatcagaggattcagacagcagccagtcagaaaaagagaataaatccgattctgataatcaggaagatggaaatgaaaaacaatcagaaggagaagcctctgacggagaaaagccggagggagaagcccctgacggagagaaaccggatggtgaaccgcctgaaaagccggaagggcaggagccgaatggcggacagggagctccgggagagcagagcaatggtgtggaaagctatgaggcggtaaatgattatacagaggatgttaccgtggaaaatgaaaccgtttcttccacaggaacagatgaaaatgccattcatgtatctgagggagccagcgccatactcaaaggccttacggtaaatcgtgaatctgaggacagtaagggaggcgatacatccagcttttatggagtaggcgcggcaattctggcaacagagggaactgcttatgtaggacaaagctccattactacggacgccgcaggcgcagcaggaatcttcgcctatggtgatggaactgtgtatacagcagacacagatattaccactcagaaagatacggcaggaggtatccatgcggcaggaggcggaacactttatgcctgggatatgaatgtggagacaaacggagaatccgcggcagctatccgaagcgacagaggaggcggaaagatggtagtggacggcggaagccttactgcaaaaaacggcggtatgttttataccacaaatacagagtccaccattactctttctgatgtagatataacaaatgcagaggacagcgaatttttcctgaaatgtacaggaaacgccaatgagagaggatggggtacagcgggggataacggtgcagattgcctcttcacagctgttcagcaggaaatggaaggagatgtggtctgggattctatcagtcagcttgatttctatataacagatggaagtacactgacaggagcagtgacagatgatgaaacaaatgccggtgatggcggagaaggttactgtaatgtgtacgtaggagaggactgtacctggactgtcacaggagacagcgtccttaccggtctttccaacagcggaactattgtggatgaagatggaaatacagttactgtaaaaggcagcgacggaacggtttacgtggagggtacaggaagttatactgtaactgtagagtcttactcggacagtgcagatctttccggttcatcggaggtgacacagtggtctgattatcaggtggaaaaaccggaagcgcttgcctgaattctgtaattaaaaatactttacaccagaaaattgcagagaatataacaggaaggaaaagaggaaaatatgaggattttacttgccgaggatgaacgggagctgtcagatgctctggtggcgatcctgaaacacaacaactattccgtggatgcagtctataatggagaggatgctcttgcctatctgcaggcagataattatgatggtgcggttctggatatcatgatgcctaagatggacggaatcacagtgctgaaaaagatacgtgctgagggaaataaggttcctgttttgattctcacagcaaaatcggatgtggatgaccgggtgctgggcctggacagtggtgcagatgattatctcggcaagcctttttcggcaaaagagcttctggcgcgcatacgctctgtcacaaggagaaatacagaggcagtcagttcggttctgagtttgggcaatctttccctggacggtacaagcgctctgctttccggtccttccggttcctgccgtctgccaaataaggagtttcagatgatggagcttttgattacaaatccccggcagattatttccacggaacgttttatggaaaaaatatggggttatgacagcgaggcggagatcggagttgtatgggtatatatttcgtatctcagaaagcggctcatctctctgaatacaaacgttaaaattaaggctgccagagggcagggctattatctggaggaagaaatatgatcagggagctccgtaaaaaatttattctgatcgccatgctgtctacctttattgttctgtcagcgattatgggaacagtgaacatttccggttatttgaaaatggcagccagagcagatgatatgacttctgttctgggcataaatgatgggaaatttccgggaaacggaaaagaagaaatggaagttgcaggcaatgagaatcctcctgatgttgcagtgggaaaaagggaagatatatttgaaacagaagcctcaagaaatttttctccggaggcaccttatgaaaccagatattttacagtgatcttggatgatgggggcgagatcagctcctgtgatctgaatcacatagcagcggtggacgaagacatggctctggagtatggaaaaacagtcagcggaaagaaaagtgagactggtttctgtggaatttaccgttacagagttataaaggatgatggacagacaaagtgtatttttctggactgtgcaagggagatttcaggatttcgtgttactgcagtaagcagtattgttatgtcttttctcggtctggctgcggttttggtactggttatatttttttctcagattgtattccttccggtggaggaaagcatccgtaagcagaaacagtttattacggatgccagccatgagctgaaaacgcctttgacgattattgatgccaatacagaggtgattgaaatggaaaccggggaaaaccagtggacaaaaagtaccagaaaacagatccagcggctttccggtatggtacagcagctggttgctctcagccgtttggatgaaaacagggatataggtgaaaaaacagaattttctgcttctgatgcggtattggaaacggtgcagccttatgaggctcctgtccggacgggaggaaaagaaatggaacagttggtagatgagggaattctttttacaggaaatgagagggattttcgccagcttgtggggattcttgtggataacgctgtaaaatatacgcctgaaggtggaaaaataagaattgctttgaagaaaaaaggaaagaaatgccagctggaaatttttaatgatgcagaggaacttcccgtgggaaaactggatgttctgtttgagaggttttacagactggacagttccagaaattcctctacaggaggttcaggaatcgggctttctgtagcaaaagcgattgttcgggctcataaaggaaaaattaccgcagaaagtccggatggaaaaatcatgaagatcacagtgatcatataaagataaagcaggcggcgcagactgatgaacagtttgcgccgcctgcttaattcagagaataccttattttacaggatatcgtctcttcggatatatcccggatgcccggcttctgccacgatttctctttcacgggtaatctgagcccatttgtcaattacctgattttccacatggacatcttcatcgataatactgtttgccaggatcacacagtttttgacaactgcgccctttctgatctgacatccacggccgataacggaattttctacagttccctcaatcagacagccattggatacaacggaatttttcacgtcagcattgtcaaaatactgtgtggggcaggaatcgtttgtcctggtgtagatcggccattccggattgaaaagattcagtgaatttttcagatcgatcagggacatattggcatcaaaatagctcttgaaatctgtgatacttgcaaagtagcctctgtgcgccactccgcggatatcaagctcactgcaggatgcgtttacgatctgcggaagagtgatcatggaggacatttttttagccttatgaatcagttctacaaaaagatcttttttcataatataggtatccataaagatattgcggtttttggcgctgccgcggttcttttcaatagattccacacctttctgcttgttcaggttcagaatatcacagttgagaaaagcttccttggcattatcaacagagtgatataaaagagtgatatctgctccggaatcaatatgagtctggagaagagtatcgtaatttgctgcataaaccatgtagcttggagcaatgatcacatatggctgatgcacacgttcgatcatttcgatgttttccagatagcctgcgatatctgtgttataaacatcattttcagagctgttctgtgcaaaaagaatctgcagtctgccttttttggagttgatgttataatgacggccggttcccagatgttctaccagagaacggggtttacgtcttatatatacctgaatatgatcaatatcgctgttgctcatattggagatcggaaagtcaatgacgcggtaacgtccaaggaaagaaaatgctgcgataggacggtaatctaaaagaccttccaccttaatatgagttcctgatgatgcaataattccaaaagcgttagccattttattctaccccctttacacgtttggaaataagctcgatatgctcgctgtctgcgcttcccacacaggcgccgctgccaatgtggatgtcttcagccacaagagctctctgaacaacagcattttcttcaacctctacaccgggcatgagaacactgtcaatgatctttgcgcccttgcctacttttgcgccggtaaaaagaacggaattttttacttcaccttctacaatacagccctgtgtaataaatgcacggttgattttggcatccggacctatgtactgaggcagagcggggatatcttcggtatatattttccaggtagggtcgttcaggtccagttcgttgttgctgtccagaagatccatatttgcttcccagagggagtcaatggttccaacgtctttccagtaaccctggtatttataagctgccagagttctgttgtcagcaagaagctgaggaatgatatccttgccgaaatcatggtgagaatcagcatttttcatatctgcaaggagcattttgcgcagaagcttccagttaaaaatataaatacccatggaagcaaggttgctctttggatgctccggtttttcttcaaattcaacaatatgtccttcaccgtcagtgttcatgataccgaagcggcttgcttctttcatgggaacctcgataacggcgatggtagcatctgcattcatttctttgtggtaagccaacatttttgcatagttcattttgtaaatatggtctccggaaaggatcagaacatactccggggcatagttatcaataaaatcaatattctgtgaaatcgcatctgcagttccacggtatacatccagatccgcgtcagccttctcgcggggaggaagtacaaatacgccgttttctcttgcatcgagtccccagcgtccaccagcagcgacatagctgttaagcagaacagattcatactgagtaagaacgcctacaatatcaattccactgtttgcgcagttacttaaagggaaatcaacaatgcggtattttccgccgtatgaaactgcgggtttggctactttgtttgtaagctcatggagtctgctgccacgtccgccagctaaaatcatcgctaacatgttgttttgtttcatagtgaaccctcactttccttttatatgcttgtacttttttattatacattttttagctgaaaaattctactggtttatgttaaaaaatgcaagaaaaatgctcaaaatttgttaaaactgtattaaagaatgaaacaaataaaaataaatatgtgatatatgacaagaaaaaacatggttcgacaaaaaggtgcagtaaaagtacatatgaataaagcgtattgaaaatacaggggatcggagaatctgtgaattactggacgggaccggagatttacgttataataacagggttaaaaggaaacaataaagacagaagcagggatatgatatattcctgaatcaacagagataagagggatcttttgtgaaaaaaagagatgattttaagagatttattgtgtattgcctggcaagtattgtcgtaatcgctcagacagcagtatttgcctatatctggtatgatttttacagagggctgatttttgaacccttctggagaaagggaaactgggttctgatcgctatttatggactgatcagctttatgttctccaagttctacgggggactgagagtaggatacctgaaaaagatagatgtattttactctatgactcttgctacgatctgtacaaatatcataacctaccttcagatcactctgatcaatagatggtttctggatccatggcctatggtggaaatgactcttgttcagattgttatcatcatcgtctgggtatggggatcccggtttatttattccagactttatggcgcccgtaagcttcttgtgatctatggggacagagatccgggagatttgatccagaaaatgaattcacgcagtgacaagtataatgtcagcggaaaagttcatgtagataagggggaaaaggctattcatcagatgatgagagactatgagggagtaatcatctgggatcttccgtcaaatatccgaaaccgttatttgaagtactgttttgcccattctattcgctgttatatgagtccgaagatttctgatgtgattcttatgggaagcgagcggatccatctgtttgacacgccgctgcttgtatcgaagaatatgggactttccatagagcagagagcaatgaaacgggttcttgatattgtggtatcgggaatcggtattgtagtttcctctccgatcatgctgatcattgcgctttttgtaaagctgtatgacggcggccctgtgctttaccgtcaggatcgtctgactctgggaggaaaggaattccgtatctgtaaatttcgcagtatgtgtgtggattctgagaaaaacggcgcccgccttgcatcaaaaaacgacagccgtattaccccggtaggtcgtgttctgagaaatcttcatctggatgagctgccgcagctttttaatgtatttatgggagatatgtctctggtaggtccacgcccggaacgaaaaagcattatgcatgactaccagaaagaactgccggaattttattaccgcctgaaagtaaaagccgggcttaccggatatgcgcaggtttacgggaaatataacactaccccttatgacaagctgaaacttgaccttttttatattgaaaattattcgtttctgcttgatctgaagcttcttcttatgacagtgaagattttctgtcagaaagaggtttctgaaggtgttgatgaaaatcagaaaaatgctttgaaaaatcagaagtaggagaaggtttatggaaaagccgctggtatccgtggtgatgcctgtatataacggagagaaatatattcagagagctgtagattctgtttttgaacaaaaggtatctctggagttgattgtgattgatgactgttctgtggatggtacggaaaaggttatggctgaatacaaaagccgtggggaagtacgctatttcagaaataaaacgaatattggagtttccggttcaagaaacaggggagtccgggaagccaaggggatctatgtggcttttttggacgcagatgactggtgggaaaaggacaagctaaaaaaacaacttattcttcttgaaaaaacaggatccgtaatctgttccacaggaagagagctgatgcatccagatggaacatcagcaggaaaatatattcccgtaaagcaaaggattacttaccgggaattgttaaagcataatagtattaattgttcttccgtgctggtacggcgagacgtgatcagtcgttttcctatggagcatgacgacagccatgaagattatattacctggctgaagatactcagagaataccagtgtgcggtcggaattaacgagccacttttaaagtatcggctcagtgaaggcggaaaatccagaaacaaatggaaatctgctattatgacataccgggtttaccgttatatgggatttaacatactgaaaagtacagtactttttatttcctatgcgattcatggcttgtggaaatatcgctgatggacaggagtagttatgggtaagattagaaatttgtgtatgacacagcttgtcagaatgaaaaaaataaaagagcctgatatgtatacctggatattttcttctgtggacaactgttattataattataattccaggtatttgtttgagtatgtaaaagagcatcttccgcagattactcctatttttgtgattaatgaggaaggattgcgccgggaattatcgaagaagtacggtgaacagtattttattgaaacggaatcaaaagagggaattcgacgagtactggaggccggtgtatggtttacctcagcaggactcccggtatatggaccgaggcttggaaggaatcgtctgattataaatctgtggcatggagttccgctgaaaaagattgcacttatggatcctaatctcaaaaaaatgtcccgcatctattttaaaaaaatcttttctgagaattatacctggatactgacaactgccagggagcttatccctgttatggcaaaaagttttcaggtttgtgaggaacaaatccgtgtatgggggcagcctcgtaatgatcttattttttttcctccggacagaaaaaaaattctcggggaaatttatccagcgttacccaactatcagaaggtgattctttatgcacctacctttcgtgattatggaaataccagactttttccctttgaagattttgacaaaaaagcgtttcaggattttttggagaaggagcagattcttctccttcttcggcttcacattaaggaggctacggcggcagaagattttgtgaattcccgcatccggtgctttggcagcaaggaggttggggatgtgactggaatgcttgggatgtttgaccttttgatcacagactattccagtatttatattgattatcttctgacggataagcctatgatattccttccttatgataaagaacgttatctggacggaaggggaatgaactttgattatgaggaggtaactccgggaccgaagccgaaaaccatgaaagaattcacagaagagctcagggcattttgccatggagaggattcctggaaacagaaacgtgagcaggtcagtaagaaatttaatgagataaggagaccctgttctgcagatatttgcaaacaggtgcttttggaaatcaagaaaagaacagagtaaaagaaaatccggaggctgcaaagcaggctccggatttttggcttttcagcttttttccataaatttaacgtattcgtcaagtacaggccctggttcaccgatttttttaatctgtccttcatgcatccacatcactgtgtcacaaagctgctttaaagtatcaatactatgagaaacgatcacaacagttctgtctttgttggagatcaggcttttcattttattgtagcttttctttttaaacttctgatcgcctacactgagaacctcgtcaataagcatgatatctgtttccagaatagctgtaatggaaaaggccagtttggaatacataccgctggagtaggttcttacgggtttgtcaataaaatctccaagctctgcaaagtctataatatcctgctctttggcatgaacctgttcttctgaaaatcccagaagcataccggaaagaataatgttttcccggcctgtcatttcgccctgaaaaccaactccgatagaaagaagagaaatactgtggcctttcaggtcaatggtaccactgtcaggggagaaaatgcctgccagagcgttcagagtagtggacttgccgcttccgtttttgccgataattcccagaatctcgccctgacggacataaaaggaaattccttttactgcaacaaaacgatctatggtacggcgtttaaaatgaagcagactttttttgatagatgtttttttcagattctgataactgatcacaaggtcagttacttcaatggcgtgctgttcttccatattatatcacctttacataactgttttcgtttttgtagatttttcggataccgataatactgatcacaagtccgattagaaaccatgccagaagaagtttgcggtgcggagtctgaccatagatcagacattctcgcatggatgtcaggagaaaggcaatggggttaccttttccaatataggcattatatggagccggaagacgatccataatgttccagaatacaccggtaaggtaaaaaataagtctcagagcaatattcagtacatttccaaggtcttccacgaatactccgtaatgcagaagaaagcaaccgaagccgaataccagcataaacagggtcaaaaggattggaatacagtacagtatgttccaggtgattggaactctccatacgatcagcatgactgcaacaatcagaaaggaaataaacattttgaatccattaatgcacattctgattatgacaagtataaatttcggtatatatactttggaaacgataggtttattacttttaattacccttacactctgtaacagacatctgttaaagaagtcccacatggtgataccgataaagacaaaaattgcaaaatactgttcgtcagatttaaacacatagccgaacataaatacataaatcagcatgaagcaaagagggtccagtatccaccacagccagttcagataagaattggcaatttcggactttagctgggctctggaagaatacactgcgtatttccaatatttcttcatgtcatccatgaatcgtttaaacataaaatccgctcctgtatttatttaaaatatataactgtgaccctttttacaacagaaaaactgtcgaaaaagggtctgaaccttccttatcatacactaggagaagctgattgacaagggggaaatacagatttgaaagggaatcacaaataaatccttcctaatattatgactgcttttttggtaaatatggaaaaactccgtgaattcaaggaaaaggcttgacttcaacatggaatctgtgctaaacttgataagcgacatggaagttgggtcttttttttatgcccgaaatcagcgtagttctgaggaacgggatacaggaaagaccatgcaaatgaaaacactggaggtggaagttgtgcgcgttaagattacattggcatgtacggagtgcaagcagcgtaactacaatatgaccaaggagaaaaagaaccatcctgagcgtcttgagactaagaaatattgtaagttctgccatagacatactctgcacaaggaaacgaagtaatcacagagaattgtgaggttagactatgcaagagaaagacaaatctactggcaaagctaagaaaactcagaaaaaatcatggtttcagggacttaagtccgaattcaacaaaatcgtttggacggacaaagctactctcgcaaagcagacagtagttgtctcagtagtcacgattattctggctgtgatgatcagcattatggattcagctattctggaaggtattaatcttataatcagataagggtaacggtgattgtatgtcagaagcgaaatggtatgttgttcatacctattccgggtatgagaacaaagtaaaggccaacattgaaaaaacaattgaaaacagacacctggaggatcagatcctggaagtgcgtgttccgctggaagaagtagtggaaatgcgtaatggtgctgcgaagcaggtccagaaaaagatgttcccgggatatgtgcttcttaacatggtcatgaatgatgatacctggtatgttgtccgcaataccagaggcgtaaccggttttgtaggtccgggttccaagcctgtgccgctgactgaggaagaaatgcgcccgctgggaattaaggaagaaaacatccgggtggactttgcagaaggcgatatggtagtagttacaggcggagcctggaaagatactgccggagttgttactgcaattaatactcagaagcagacagtaaccatcaatgttgaattgttcggtcgcgaaacgccggtagaaataagtttcgcagaaattaaaagagcgtaacacattcaagtgggagggaaaaacccccgccaataccacataggaggtgccgaaaaatggcaaaaaaagtaacaggttatattaaattacagattccggcaggcaaggcaaccccagcaccgccggttggtccggctcttggacagcacggtgtaaacattgtacagtttacaaaagagttcaatgcaagaacagcagatcagggcgatctgatcatcccggttgttattactgtttatgcagacagaagtttcagcttcataaccaaaactccgccggcagccgttcttctgaagaaggcagctaacatcaaatccggttccggtgtgccgaacaaaacaaaagtagcaaaagttactaaggcacaggttcaggaaatcgctgagatgaagatgaaagacttaaatgcagcaactcttgaagcagctatgagcatgattgcaggtactgcaagaagtatgggaatcgaagttgtagactgattttccgtcagaactgcgaaatagagaaactactatatgaagtgggagggaaatccccgcaattaccacaggaggttatagaaatgaaacgaggaaagaaatacgtggaagctgcgaaagcagtagaccgcgcaacattatatgataccgcagaggctatcagccttgtaaaaaaagcagcagttgctaaatttgacgagactatcgaagctcacatccgtacaggctgcgatggacgtcatgcagatcagcagattcgtggagctgttgttctgccgcacggaaccggtaaaaaggttcgtgttcttgtatttgcaagagatgcaaaagctgaggaagcaaaagctgcaggcgcagaattcgtaggagctgaggaccttattccgaagatccagaacgaaggatggcttgatttcgacgtcgttgttgctacaccggacatgatgggcgttgtaggacgtcttggtcgtgtacttggaccaaaaggtcttatgccaaacccgaaagccggaactgtaactatggacgttacaaaagcggttcatgatatcaaagcaggtaagattgagtatcgtcttgacaaaaccaatatcatccatgttccggtaggtaaagcatcctttactgaggaacagttaagcgacaacttccagacgcttattgaagctatcgttaaggctcgtccgaacactctgaaaggtcagtacctgagaagcgtaacaatcgctcctacaatgggacctggtgtgaagatcaacccggcgaaattagtttaatatatgaaaacaggggcattcctttcgggggatgctcttttgtttttgggggtattatagtgataaaaagaaaaacacctcttgagaaggaactcagattgcttgaaaaacaggaaaaaagatatctggaacagagacagaaacagaatgattcaaaactgaataagtttctggaggacaaagttccggataaactgcaggagacactggaaaaggctttttgcagtgctttcaggcttatttttttaaaagggatttctgttattgaaaagacatacaagaaggaagaactggaaaaggattttaaggtacaggattatgccaatcagataaaaaatgaccggaaatcactgaaatcaataaggaaaaatgccggaagcacaggaagatttaatacactggcatccgggacagcaggactgggaatgggtcttatcggtgttggaatcccggatatacctgtattcacaggctttttactgagaagcatttatcagatcgctttaaagtatggattttcttatgaagaggaaaaagaaaaaaagtggatacttcttctgatacagggagcggcatcttatggggaaaaacaaaaggcagcggataaagcggttgagtgctacatccaaaatgaactcgttgataattccattccgctggatgaaataattcaggaaacagccaggattctttccggagagctgctttatatgaaatttcttcagggtattcccattgtgggagtggtcgggggagcctttgacttcaagtatatgaaagagattacaacctatgcggaaataaaatacaggaaacgatattacaggaatctgtcggaatatgatatgatagaaaagaaataatggtagtttagagaaaaattccagaattattttttatgatagaacagggatggaaagagaggaatcagcgtggaaaaaagaagatacagaaaaaagaacaggagaaaacagaatttaaaaaagctgttaatggttctggtcattgtatttgtattctttggtctggagctgatcgtaggctggcgatcaggagttggcgcatggatgcaggagtttcagaaacccgttgtccgtcagctggacctgagcggaatcagtagcccctatgcgattctgattcaggccggaagcggaaagacagtaggcgatcttaacggggaagagcagatgtatccggcctctctgacaaaaatgatgactgcgattgttgccattgaggaactgaaagatctggaccaggaaatcacgctgactcaggaaatgtttgccggattatatgaacaggatgccacgcaggcaggatttcagcccggagaaacagtccgggctatagatcttctgtacggcgttatgcttccctcaggcgcagagtgctgtatcgctctttcttatgcgattgccggttctgaacagggatttgtggatctgatgaataaaaaagcagaaaagcttggaatggacggaactcatttctgtgacagcacaggacttcataatccggatcattacagtacggcaaaagatatggcagttcttttacagtatgcgctgaaaaatgatacgttccgggagattgcagagagtccctggcattctacgcccggtacgaatctccatccggacgggattacctattacagtaccatgtttaagaacctttcagagacctctgtaacaggaggaaagattctgggcggaaaaaccggttttaccaatgcggcaggaagctgtctggcaagctttgcagaaatcgaaggcgtggaatatatccttgtgacagcaggagcaatggatgggggaacgccgaatattacagatgcagtgactgtttacaatcgcctgggagaggcggcccaagccctgaaatagttgatatctaaggggaaatattatcaggaaattatttttgccttaaggaaatcaagatgattctgcaggatagcagtactttatctgtaaagtaagagaattatattggggaaaatagacaaaaatttataacattttttgtaggatattccagatagacagacataattttttctgctatccttgtatacagaagttaaataaagacggattagtccaaggattgttactgaaataatttattatcgtcaggcaagaccttatagtatatgaaataagttttatatactgtaatggtctttttttatttatttgcagtagtagggagcgaaagggaacatggtaatttataagattttaaataataatctgattttatcaaaagataatcaggggcatgaagtcatcataaaaggatgtggaattgcttttcagaagaaaaaggggcagcagatagatgaaaaacggattgaaaaggtttttgtcgcagagacagcgcagatcagtaaagaaattcagggatatctcacctctattccagaaatatatcttgactttgtggaggagtatgtaaatgaggtaaaagaaaaaaatggaatgaatctgaatgacagtatttatttttcattaagtgatcacattatgggagcgatttccaggttaaaacagggaatccgtattcagaatatgcttcttctggacatcaaacttctttatcataaagagtatgaaattggtttggatttgctgcagaaagtaaatgaaacatttgaaacagatctggcaattgatgaagctggattttttgcattgcattttgtgaattcacaggacagtggaaaaacagacagttaccagatttccgtaatcgtacaccagattttggatgtagtagaaaaatattatgaaaacataaaatttcaggaagaaaatctgtattatcagagatttctgacacatttaaaatattttgcccagagattttttcataaggaacttcactatgaagaaaatggtgaactgtttcagattatcagagagcagtataaagaagcctatgggtgtgtaaaaatgatttacctgatgatgaaagaagaatatgaatacgatatgacggaagatgaaatgctgtatctgacaattcatattcagaagattacagaggatcataaacggctacagtcgatttagtgtaagatttttacagacatcagataaggtgttaatggattgttactggaatgcgttcgataaaaacgtatcttttcaggcaagacctttaatcataaattttaatatttattattaaaggaggttctaaaatgaaaaaggactatttagaaactgcagacacgctaattgcagcaatgggaggaaaggacaacatcatccgtttatttcattgcatgacaagacttcgtttttatgtaaaagacaaaacgaaagtcaatgaaaaggagattttaaagctctccgaagtttcaggtgtaaactggcacgaggaacagtttcaggttattgcaggaaatgaagtaaatgctgtctataaagcgctggagaacaaaggcattccgacggacgatacacgggaaactgatcctgtaaacccaaaaggggttgtttccaggattgttgatgccattaccggttgtatgacacctatgattccggctctgacagcggcaggaatgattaaggttgtacttacacttttaacaactttccatttggtatctgataccagcagcacttatcaggttatcagttttataggtgatgtaaccttttactttatgccatttctgattgcggcaaatgctgcaaaaattttcagagtaaatcagtcgctggcattgtttatagcgggtgtttatctgagtcctgtatttgtcagtatggcagctggagatgcggcaattactttgtttgggctgccggttacaaaggtaacctattcttattctgtaattccggttattctgatggtatggatcacacactacattgaactttttgtagatcgtattacaccgaagatggtaaaattaattctcaatccaacactggttattctgattagtgcgccgatcgccctgattgtagttggtcctatcggaacaatcattggtaatggacttgcagtagcaatcaactttttatctgcaaaacttggttttgtgatcgttggtattcttgcagctcttttcccgttcattgttatgacgggtatgcatcatgcgcttacaccaatcggactgaatgcaattgcgacaggaggctcagataccctgatttttgtatctcaggtttgctctaatcttgcacagtcaggttcttcttttgcggtagcagtaaaatcaaaagacagtaatatgaaacagcttgcaagtgcagcggcagtatctgcattaatggggattacggaaccggcactttatggtgtcacactgaaattgaaacgtcctgttgttgctgcatctgttgcagctggaattggcggtattgtaggtggactttttcaggtatccctgtatattgctcagaattgtattatggcaattccggcatttatcggggataaagggatgagtaaccttctgtatggaatcattatgattattgtatcgtttgttgcttcctttattcttacctttattttgggatttgaagatgtaaaatcagataatgagataaaggaaagctcagaggcacagggaacaacagaaacacagcagagaaatcctttagtagaaaaagttgaactttatgcacctgtaacaggaactgtaaaaacacttgccaatgttgcggacaaaacttttgcagataaagtacttggagatggagcggcaatctttccatcagaaggaagagtttatgctccggctgacggaaccgttgtaaatatcatggatacaaaacatggaattatgttcgtagcagacagtggagcagagattttgatccatattggactggatactgtcaatcttaaaggcaaatactttaaatcttatgtaacagacggtgaaagagtaaagaagggggcacttcttgttgagtttgaccttgaagcaatcaaaaaagaaggatatgatttgactacatcagttgttgttactaatatttccgattatatcaaggccgtatgtatggaaaaagagggtagtgagatcagtgcaggagagaagtttctgacagtcgtataaacataagtacagatcaggcagacaggagatatctgtctgccgttttaaagacaggagaaagcagatatgaaaagttataatcgtatgcccgaaaattttttatggggcggagcaacagctgctaatcagtatgaaggaggatggaatgagggcggaaaagggttgtctattgcagacattcttacgggaggaagcgtcaataaggaacgccgtctgacacctccggagccgttacccgaagaattttatccaaatcatgaagcaactgatttttatcattgctggaaagaagatattgctctgtttgctgagatgggatttaaaatatatcgtttttcaatttcgtggtcacggatctttccaaaaggagacgaagaaactccgaatgaagaggggcttaagttttatgatgatgttatagacgaattaagaaaatatggaattgaaccactggtaaccatttctcattatgaaaatccacttcatctttcgctagagtacggtggttggaaaaatcgtaaactgattgatttttatcttagatttgccagagtattatttgaaagatataaaggaaaagtaaagtactggcttacatttaatgagattaatatgctgacacagccgtttggcgcagttttctgtgcagggatgctggattcggaagatgtatgcctgcagagtcggtatcaggcaatgcatcaccagttggttgcaagtgctttggcagtatctatggcgcataagattgacaatgaaaataagctggggtgtatgctggcatatcataatggttatgcttatacctgccatccagaagatgttttttatgcccaaagatttgggcagattcataattcaattgccggggatgttcatgtgagaggatattatcctggatttgctgcaagattttttgaagaaaatgaaatagagctggagattgagccggaagatgcgggtatattgaagaatggtacggtagactttgtttctatcagttattattccagtaattgtgtcagcgttgtgaaagaaggtgagctaaccgctgccaatggaggggaaaatattaagaatccatatcttgaaacttctgcatggggatggcaaattgatgcagtgggactcagatatgttttgaatcagatttatgaccgctatcagattccgatcatgattgtagaaaatggtctgggagccgtggatgagctgacagaagatggaaaaatccatgatgaataccgcattgaatatatgcgtaagcatatagaacagatgaaggaagctatccatgatggtgtagaactggttggctatacatgctggggatgtaccgatcttgttagtgcttcaaccggagaattgaaaaaaagatatggtctgatttacgttgataaaaatgatgacggaacaggaaactttgccagaattcgtaaagactctttttactggtacaaaagagtaatagactcctgtggtgaaaaactataaaagaacaataaaatatcctggccaggttacggagcctaaaagctctgtacctgccaggatattactattctgtgatggtagagttaaataacattattttcacacatgatttcagacgaaagaagatcaataattctcgactttgcgctcaaaataagctcttggatgggcacataccggacatacttcaggagcttcgtcagccatatgaatatatccgcagttgcggcatttccagccaagaggcgcatctcctttaaatgttttatcagctttgtaggattccagaagttttttgtatcgggcttcgtgagcagcctctactctggcaacaccttcaaatttttcagccagctcttcaaaaccttcttctctggcttcccgtgccattcttgcatacatatctgtccattcaaagttttcgccctgagcggcatcttcaagattggtttcaatatcatgaattccatgaaactccttaaaccacattttagcgtgttctttttcctgatccgcagtttccagataaagagctgcaagctgctcatatcctgctttttttgcagcggaagcaaagaaggtgtatttatttcttgcctgtgattctcctgcaaaggcttccataagatttttttctgttttggttcctgcatactttgacatgtggtttcctcctttatcactgataattgattgtttaaaattgctgtatagcttcttataccatatcattcaaaacataagtgtgtcaacatatgtttgatttaggctgttttttacataaaagaaagtggagagcatgttctgctctccgcttcagaggcttattcttagccgaagtatctttcaagaagaccctggaatgcttttccgtgtctagcctcgtcacgagccatctcatgaactgtatcatggattgcgtcaaggttagcagcttttgcacgtttagcaaggtcaaatttacctgctgtagcgccgttctctgcagcaacgcgcatctcaaggtttttctttgtgctgtctgttacaacttcaccaagaagctcagcgaattttgcagcatgctctgcttcttcataagcagctttttcccagtaaagaccgatttccggataaccctctctgtgtgctactcttgccattgcaaggtacataccaacttcagagcactcaccctcaaagtttgcacgaaggtcagcaaggatgtcttcgctaacgcccttagctacacctacaacatgctcagctgcccagctcatgccttctgcctgttttgtaaatttgtcagcagatgctttacagatcggacatacctccggtgcgttctcgccttcgtaaacataaccacatacattgcatacccatttagccataatgataatctccttttcttaaataattatttttaataatagtaattgttactgttttgctatgtctataatctaccatactgtttgctgaatgtcaagggaaattcttaatttttttctttcttcatgcaatcttcacacattccgaagaatctggcgctgcagtcagtaattatgccgttaaaatgctctccggcccttttcataatatcctgcatgtcttctgtttccagatcaatgacacagccgcattctgtacacataaagtgacagtggggctctacccggccgtcaaaacgatctgcgccgccaaagctggcaagttttttgatctcaccaagatcagaaagcagagaaagatttctgtacacagttccaaggctgatatttggatagatagatttcatgttttcatataccgtatcagctgtggggtggtctgtgcgtgtcatcagaaattccttgatggattcgcgctgtctgctgtattttaatgcagccataggcacactcctttctcctgtaataacaataatggttattgatattataataaaacagtactgtatttgtcaagaaaattatcggattatctttaataagtcttttgtttggttccttaaaaatgtgttaaacaggaaattttcttatccaatatcaaaggccagatgttttatgattcagatatgtcgaaaagataaaataactgatttagaatctctgggataagaaaactttctgagcggatttttgttaaagtataacaggcctttgggaaacttcccaaaagcctgattaaagttgaattatatgattaactatctgggtttttatggaaaagagattctgtaaaaggtagcccaagtaaagttaaaaagggaatatatgtcatgatatgtcttggatgggcttcccaaagtgcggtgaataaaattgttccgccccagtatataaccagaatcaactgcataagtgtcatcttttgtctgctgtaaagaagccccagaaatattaatacaataatcgtcaaattatatgcctgcagaatgcccttggttacactcatatatggacctgcaataacctgatataaaaaagtgtcctcttttacattttttacatactggtaatatcctcttgttccaataccccatatggcttctttttttaaaagcaggagaatattgccggacagaccgttttctttcagatttttacagtaggcttcccaagttttctgctgtctttctttataattttgaaaggattttgtatactttacatcgttcccgtcatatgttccgctgtcatggcttcccatcatcaaaaagtgtgttacagggacggcccgttcggatgtgtcaaatttaacatgataattataggctgctccatacataagctctacaaccaaaaaagcagtactaaacagaaccgccagccggaaaatctgtttccagagccttttgtaaatcaacgccacagcaatggctatcaggataatcagcgcaacaacgcgaactttgcctgcaatggcaaataatattcctgcaaggaataacagcagatatttttttgctttttctgactgataagccgttactaggcataatacagctgcaatgcttaatggaattgaaacagtatcagtgtaatagtaagaagcatatacaaaaaacagcgggttacagagcataataattttatagaaaaaggcggttttatagttatgggtaagcttgtccgctagacgaaaaaagcacaaaaaaccaatccaaatcataataacattaaataatccgccgacaatgctgtattgaaaggcttctcccataattattttaccaatataaaatacccaatatatgatgattgcaatagggatattattggtataaaaggaaaagtagtcttcattggtaaattcatgagttccttcttctaacatgtccagagactgttcaataatatgagataaatctacatttggctgtaattgtaaggagaatatttctataatatacaagacaaaaataaaaacagccagtaccctgaatattttatttaaaaaagcttctggtaaacggatgcataatacacagataattgtgaagaatccaccaacaaccagaatgccacaaaaatacgctgtcattgtaacatgatccggtcttacaatcgcatccataaaactggacattattacaaatacagaaaacaataacagaaaaaatactgctgttttttcaataaaattattctttttcattttccgcttttgttctttcgctaattatatatctaggttttggcttggcttccagatatatttttcccatataggttcctataactccaaggcagatcaactgtattccaccaagcagacatataatacaggtcatgcttgctcagccgactactgtctttcccatgggctgttgatacactgcctatattgcgccaataaagctgacgctagaaataaatataccaaaacttgtaataatagttaatggcttgacacttaaactggtgcttcccttaaaggcaagtgtcagcattttgtttagaagataatggcctttgccggccatccgactgtttctggtataataagtacaggtgcttttgaatccgaccaattgtatcatttctcccaggaacagacatacctttttgaattttaccagctcttttatgattttccagatagtattactgcttccatcatttacaaacaaaatacgactgtccctatggatttttttcttatggatcaaatcttatatttgtgcccagaaacattttggatgtaattggcaatatctgtttttcgttgtaacttgaaacaacgattactaaatttaggttccacttttttacccattgtatttcctttttgtatttattattataaatgtttaaaatttgtttttcaatggaaatttggctgtattaattttactggacgtccagacgtgacagatgttctaccaggatttttcgtataccggaatattctcccagtccttttaaaacaggttctacctcatagccggctgatttaaactggctataccaggattccgggtcatctcccgccatatcattttttgcatggtctccggctacgatcataaaaggagccagaatcactttggaaggctggtaggaacggatcattttcagcagagtttccatggaagggtaggcttcaaccgttccaaggaagatattcgaatatcctttgtctttaaatgtatagtccaaagcagcgtaaatggaattggaaaaatgcgtagtgccatgtcccatcaaaacaagaacctggtcttttttcaggctggaaaattcgtctgcaatggcctggatcacatccaggctgtcctgttcgctggtaagcaaaggatcgccaaaggaaatggagtgaaaatcctccctgtaggaaagggcgtcctctttcataagatcgttttcaataccattgatcacatgagttggctgaataagaacatcagtgattccatctctgcgcatttgctccatggcctcttttaccgtatttacatggatctgatccctgtccttcagctttcgaatgatcattttgctggtccatgcccggtaaaggggataatccggaaaggctgcctgcatttctttttcaatagcgtcaatggttaccttgcaggtatcatggtggctggttccgaagcttacagccagaattgctttttttctgttttcagtcacgatgttgtttcctccgtaatgtgggtttaaattaatatcagaaatgtaggtttcaagcgtttttaaattgcggggaagaggcagggaagcctttaaaatcccttttttacatagactttcaaaaagctccagaacagcaggcgtttccaggtttgtttttttcagagcgccccggtttccaaaaacctgagcgggagttccctgcatcagtacctttccttcatgaaaaagcataacctcgtccgcccattcgtaggcatagttgacgtcatgagttgccatcagcacagtgatgccctgttctgtcagctgctctacgatatgatttaccattgtggtatggcggggatccagagcagcggcaggctcgtccagaatgataatatccggatgcatgaccagaatatctgcaatggaaacctgttttttctgacctccgcttaaggcgtgggtgggcttatggcggaaaggagtgatctccagatattcgatcacatcctccacctctttttttgcctgttcttccggaaccccaagattaagaatcccaaaagagatttcctgaaaaacgctggcagaaaagagctgattgtcaggatcctggaatacaatccctaccttgctgcggagcttcagaagatctttctttttataacccacttcctctccgttaaagtacagctttcctgactgaggcttcaggattccggtacagcaaagaaaaaaagtagattttccactgccgtttgcccccataaaggctactttctgtccccgtctgatttccagggaaagtccgttaagggagtgggagttgttgtcatcataggaaaagtaaagctcatcggcttttaaaataatatctggattcataaataaaatctcctccacagagcaaataaaaataatgcgccgtcaaacaggataatagccagaatcaccttttttttaggcgggcgggattctgacagaacatggatagttccgtcataacaccgggcttccattgcgtcataaaggcggttggagcggctgatggcgcgtatcatcagaacagaccccatcataccgaaggacttcagagctgtccggtagtttttatttccaagcctgcagtcctgagacatggaaatcgcgctggcagtttccagcagaacaaaaataaaacgatagatcagaagcataagctcgatcagtattttgggacagtgcagtttctttaacacatccaggatatccggtaccggagtggtaaaggaaagaaagtacaggcaggaaaccgctgcaagtgcagtaaggatcagctgcagggcatacaggcaggaatccagactggaggtaagataccatgttcccacagaaatggcgaacagatccagaggagttttccggatattcagtataatagccacagtgcttaaaagtaaaaaggccagtggggcagtaaggaacttcagatagcgaaaaacagggaccccaccataaaaaacggtaagaatccctgttgctgctaaaacaatccctgccactgccgcggaacgactcattacgcagatacacagcgtaatcacagcaaaggcaaatttttcaccggcattttcatatctaagctttgactgataacaaagcttgtcaatgacaatcataaaaatctcctttcatcagagaaggccggattttgatcattgatccttcatccattttttgcgttctacaaaacgtcccattataaaggcgataattccgactccgatacctgtctggatacagaaaaggagactttccacctcgcccggaagctctccgccaagaagctgttcaaaaacaggcgtagcccatggctcataagaggaatcgacttcttccacaacaacacttccggcatcgtcagaaccgccgaactcggcatccttcagtacaaacagcgggacaaaagcaatcagaaaaatggcaacgattgcagcgattacagtctttttcatattattttgcctccttcagaattcccattgcgcgaagctccggttttgcataggtttcaagacccatgaaaattactacagtgatgataccttcgataatggcaagaggtacctgtgttggtgcgaaaatagccatgaatttgcccagggcagctccgaaggtagtgtctgcgttatgagcaagagcaagctggccggctgtgacgcagtaggtaaacagatcgcccagagcagccgcaaggaaaacagcaacccgtttatttacattcatttttttgcacagaacatagattccataagaaacaaacggaccggcaatagccatggaaaaggtgtttgctccaagtgtggtaagtcctccgtgtgccagaagaatcgcctggaacagaagaacgatcagtcccagaatggaaacagcggccggaccgaagagaatggctccgagaccggttccggtcatatgtgagcagcttcctgtgacggacggtatcttcagtgaagaaatcacaaagataaaggcgccggacatggccagcatggtgatcaggtttctgtgttcattcagagtcttttttatggacataaatcctgcaataagaaagggtacgcataaaacatcccatgcgatgcaaaagcttcccggaagataaccctccatgatatgcatggcactgacgtttggaacaatgccgaaagcaagagcaaaggctccggcaagtacaagaattttcttttgttttttactcattttcttctcccttctgatcaaacagaactaaaataaaaaaacctgtgcggttataccgacaggccatcagaagaacaagaggtaatagcaggaaaatagaattgatctgctatgagccaacctgttcttacacaaggccatcgttcgtaacctgtgtaaatttcatgtaaaaggcaggccttctgacttgggcatcatcactgcatttcgtcttcccgggtatcttcagatattcagtgacataatgaaatgcggctcttccgttacagcggcgtgaccgtgtgagactttcactcaactttcctattctcctgcataagcagacaccgttttacattcaattctgaatttattgtagcataaaccccagtgttgtcaaggaaaaacgcagcagggatgcaggaaaccgcagcggtctttttttctggatgacactgtgatatactggttcaggaatgaaaaaaacataagaaattcttaataatttaccccttttatcttaaacaccatttgatattcttagtataacgaatcacagaaaagagactgtgatccggtgtgaatttaattttgtttcaggaggtacagagacgtggcagaaatactggtttgtgatgatgacaaggcgatcgtggaggcaatagagatctatctttcacaggaaggtcatcatattcttaaagcttatgacggagaggaggctcttcggacactgcgggaaaatccggtagatctgctgatcattgacgttatgatgccaaagctggacggaatccgggcgactcttaagatcagagaggaaaacccgcttcccattattattttatccgcaaagtcagaggacgcagataaaatcctgggcctgaacgtaggggcggatgactatgtgacaaagccctttaacccattggagctggtggccagagtcagatcccagcttcgcagatatactcagcttggcgctgtatctcagaaaaaggaaaatgtttacgtaacaggcggactgactgtggatgatgaccgcaaagaggtctgtgtggacggggaaccggtaaagctgactcccattgagtacagaatccttcttcttctggtaaaaaatcagggaagagtattttctaccaatcagatttatgaaaatatctggaacgaagaggcaatagcggcagacaatactgtggcagtccacatccggcatatccgtgaaaagattgagatcaatccaaaggaacccagatacctgaaggtggtctggggactgggctataaagtagaaaagctttaaacgcccggcaggttattaagaagagaaatccatatatcaggaagatggaaaggggcattattatgaagaaaagatggtatagaagcagcgcggtgaaagccgccgctctggtagtgggcgttgcttctctgactgctgcggcagcaggcggagcggcatctgcaggaattatgagtgaaggcgttctgccttttgacaaaaaggaatatctggaatccagaagctttgagcagagtatgcgtcatgccagctttgatgtgctgatcgcagaatcagaaaaaagctacatggaatcaaaacaggaaaacgaagaggtggatctgtgggagatccttgcagatgaggaaacggatacagaaggctcctcaggtcttgtttacaggctcggcgaccttgagaaatgggtggagaccgagaactgggatgctcatacagaggatgttctggtgtgtgtgaagccggatggaaatctggaatatatgtattatgaagattttgaaaaaaagatcagagacggagaactgggatttctggtggcagatacctatggagaatatgatgatggggaatatgcagaaggctatactcagccggaagaaagcggcagcaagtttgtggatgcgctttcagcacaggggattctggcatgtctgaaaaaccatgattattccagctacggatattatggagatattaatgattattatgctgaaaatatcggagtcctgaattccggcgttaccggaattgctgatgaggacggcaagatcatttatacaaacgtgatcaatgaatattccgattatcagattgcagaggctttcccgccggtgggtgcagacagcatcctggatatcctgaacgaagagcccggatggaagggaagatttgaggatgccttttatgccctgaaccatgctcttgctcaggtacagatggagaagtcggcagaagctatgctgaaagagcattacggtgagggaaaaaccaatttaagctatattctggccctgaatccgggaagccgggaagaaaagatacagtccaacacagatgcaggagattatgaaaaaagaatccagaaattaaaatccggtcaggatccgtatgttgtagtcacttcttctccggaagagcatgatacaaacatcgatattctgaagaaagaccattactttaatctgtggcagcatacagtggacaatgcagctgcggatgaccgggatatcgactatgtatttgccgcctgggtcgataaggattttgcggcggacgatctgctggcagaggacgcagagaattttgaaaaatatgcagcttatcttacgccttccatggcggtatgcggcgcagggagcctgatctttctgatctgccttattattcttactgccggcgcaggaagaaacaatgaaaaagaagaggtacagctgaatttctttgaccgctggtatacagagatcggcgcagcagctgtatgtgctgtgtgggcagttcctgtatttctgtttctggggcttgggatcaatgtagactatgtggataaactgaaatatattgtggcagcagtggctggtctgggagcctggaccgcagtgatgtttttgggcggctggatgagtctggtacgttgtataaaagcaaaaactttctggaaaaacagtgttctgagaaaagtttttggcttgctgagaaagcttttaagtctgctcaagaagttttgccttaagattgtgaaaggctgcagaaggtttgttgattttttcgcggaaaacacagctagcaggattaaaatggctctgctgttcggaggattctgtttcttccagtttataatatggacagtgatactttgcggcggagtgattcttcttccggttgttgtggcagtggatattctgggactgatctattttctcagaaaagccagaggacgggagctgatcctggatgggctgaaacgtattacagacggtgagcttcagtataagattcctcttgataagcttaccggagagcagagacagatcgctgaatatattaaccggatcggagagggacttgacgcggcagtggaggaaagcctgaaaaatgaaaggatgaagacagaactgatcacaaacgtatcccatgatatcaagacgcctcttacttccattatcaattatgtagatcttttgaaacgggaaaatcctcaggatccgaagatccagggatatctggagatcctggaggaaaagtcactgagactgaaaactcttaccgaagacgttgtggaggcatccaaggcaagcacaggaaatatttcactggaaatggcagatcttaattttgtagagcttgttcatcaggtgatcggagaatttgaggaacggttccaggaaaaaaatctttccatgatggtacattttgatcaggatgaagcgatcatctgcgcagacggaagaagaatgtggcgtgttctggaaaatgtttttggaaatgttgcaaagtacgctatggacaacacaagggtttatgcagaaatcagagtaaataagccaaatgttacattttccctgaaaaatatttcttctcagcctctgaatatttctgcagacgagctgacagagagatttatcagaggagatgtgtccagaaatacagaaggcagcggactgggactttccattgcaaaaagcctgactgagcttcagggcggggagtttaagctttatctggacggagatctctttaaagtgacaattacgtttaaggtaaaagaaaaatgataattttcgatactgtctgagacagtggaaagaaccctctgaaaaataagagataaaataagcccccggtatcgctgtgatgccgggggcgctttatggtatcagaatacttttatgagattataggaatcgtctacaagcagaacatctgcatatttgcccggagtaagggaacctactttgtcatagacatgaatacttttggcaggatttctggtagctgcaaaaatagctgtggattcagggataccgaattccatggcttttttcatgcagtcaaaaagatttgttgcagatccggcaatggtaccgttggacagagttgccagacggtctttcatggtaacttcctggccgcccagttcataggtgccattttccattccggttgccatcatagagtcgctgaccagaacaacacgctcgtcaccaaacattttaaaggtagtgcgcacaacacatggatgaatgtggaaaccgtcacagatcagctctaccatgcagtcctcactgtcacatgcggctccgatcacgccaggatctctgtgagcaaaaggaggcattgcgttatagagatgtgttacgtgatttacaccaagctccatggcttttctggcacagtcgtaatctgctgtagtatgtccgatggaaattactacttcgtcctttgcagcctgaataaattcaaaggcgcggtctacattaggagcaagtgttaccagtctgatctggtttccggaagcctcgttgcactgacggaaaaaggatacgtcaggaacactgatatactcagcggcctgagcgccttttttggcaatgtcgatcagcgggccttccatattaacgccaataatgcgggcaagcttatcgtccggttccacctttgttgcggtggcaaagatgtccataagtctgtcctttgcaagtgtcatggaagtaggacagtaggaggtgattccgtgttctttttcatatttcagaattactttcaggccttccgggtcggcatcgcagaaatcatgtccgaaagcgccgtggctgtgaacgtccaccagtccgggaagaaccgttaacccttcagcgtcgtattcggttttgtcagatacttctgtctcggaagcagccagtctgccattttcaatgtacagatctttttttacaaagcttccgtcttcctgaaatacaagtccgtttttaataatcataatattatctccttgatttttaagatgcagttatgctgatgattctattataagtctttgacaaaattaattcaatctgaagattataaagagaaagaactttcaaagtgcatacatatttgaaaaaattatacaaaaaatagatagtaaaattgtgcgagatgctgaataggatgaaagaactttcttaaaataaaaatctattgaaaaaactttcgaaagcgttatactatgtgcagaaattgcgaaagcggaaaggagagcacgatggaaaaaaaattagagcagatcaagggacatctgatagtatcctgtcaggcgcttcctcatgagcctcttcattcttcctttattatgggcagaatggcaagagcggcagcggaaggaggagcaatgggaatccgggccaataccagggaggatattgaggaaatcaaaaagaacgtagatcttcctgttattggaattgtaaaaagagattatccggacagcaaggtgtatattactcctaccatgaaggaaattgatgagcttatggaagtaaagccggaaattatagctgttgacgctaccatttctttaagaccgggaaatgtgactctggatgaattttaccatcagatccgtgaaaaatatccggagcagatgcttatggcagactgttctacagtagaagaggcgcttcatgcagacgagcttggatttgactttattggaacgactatggttggctatacagagcagagtaagggagacaggatcgaggctaatgactttgagatcatccgtacaattttaagtaaggtaaaacatcatgtgatcgcagaaggaaatatcaacacaccggaaaaagccagaagagtggtggaactgggctgttacagtgtggttgtaggttctattatcacaagacctcagctgattacaaaatcttttacagaagaaatgaaaaaagcagagaaataaatcataagggaataccccaggaggaatgttattatgagtaaattggataagtataaaggaattattccggctttttatgcatgctatgacgcagaaggcaatgtaagtccggaaggtgttcgcgctctcacccgttattatattgacaagggagtaaagggcgtttatgtaaatggttcttcaggcgaatgtatttatcagagtgtagaagaacgtaagcttatcatcgaaaacgtaatggctgtggcaaaaggaaaattaaccgtgatcaaccatgttgcctgcaacaatacgaaggacagtgtggagcttgcaaagcattctgaaagcgtaggagttgatgcgattgcgtccattccgcctatttatttcagacttccggagtactctattgcagcgtactggaatgagatcagcgaggcagcgccgaacacagactttattatttataacattcctcagcttgcaggaacagcgcttacaatgagcctgtttgcagaaatgatgaaaaatccaagagtagtgggcgtaaaaaattcttccatgcctacacaggatatccagatgtttaaatcagcagggaaggctgcaaagggcgagtttgtagtatttaacggcccggatgagcagtttgtggcaggacgtgcaattggcgctgacggaggaatcggcggaacctatggagtgatgccggaactgttcctgaaattaaatgaactgatcgtagccggcgaaagagatactgcagcagctcttcagtatgacattaatgagattatttacaaaatgtgctccagccatgcaaacatgtatgcagtggcaaaagagattctccgcataaatgaaaatgtagacctgggcggtgtgcgtaagcctcttgaaaatcttcaggaagccgataaggcggttgcagcagaggcagcagcaatgataaaagcagcaaaggataaatatctggcttaaatgccagatgagagggaggtaatttatgcagggatttacagtgattgatcttgttattctgatcgtatatctggctgcggttttgtttgcaggccttcattttgcaaaaaaagaaatgaagggaaaagaatactttaagggtgacggaacagtgccgtggtgggtaacttctgtttccatttttgcaacacttttaagcccgatctctttcctgtctctggcaggaaactcgtatgcgggaacatggatcatgtggtttgcacagcttggcatgcttctggcaattccggtaaccatccgtttcttcctgccaatttacagcaagctggatattgatactgcctatcattatctggaactgcgttttaaaagcaaaggactccgtgttctgggcgcagtaatgtttattgtatatcagatcggacgtatgtccattattatgtatctgccgtgtatggtgctgtcaaatcttatgggaatcaatgtaaatatcctgatcattatcatgggtgtgatcgcgattatctattcctatacaggcggactgaaatccgtactctggacagattttatccagggatccgtacttctgatcggcgttacctttggcctgtttttcctgctgtttcatattgacggcggactcggagcgattttccatgagtttactgcaggccacaaattcctggcagcagatcagcctatatttgatgcaaatattctgaaagacagtgtatttcttcttatcataggcgccggattcaatacaatgggttcttatgtatccagccaggatattgtacagcgttttacaactacaacagacagaaaaaaactgaacaagatgatgcttgcaaacggagcgctttccatttttattgcaacagtattctatcttatcggaacaggcttatatgtgttctacaatgtacagggaaatcagcttcctccggcagcgcagcaggatcagatctttgcatcctggatcgcgtttgagcttccggtaggtattacgggtcttcttcttgcagcaatctatgcagcggcacagtctactctgtccacaggtctgaactctgtggcatccagctggacactggatatccaggagagactttccaagaagaagctcagctttgagacacagacaaagatcggtcagtatgtatctcttgttgtaggtattttctccattattgttgccatggtactggcaaacggcggagtaaaatctgcttacgagtggtttaacggatttatgggactggttctcggaattctgatcggaacctttattcttggcgcatttacaaaggtagcaaatacttttggcgcaactgtagcgtttattgcggcttctgcagttatgatctacattaaatattttattcctgcagacagagtatctatctggtcctactcaattatttctattgcagtatctctggtggtaggtattcctgcaagtatgatctggagaaaaataaaaggagatcagtcaaagccggctcccaatacaactatttacaaaaattaatcagcagcacagaatcagcctggtctttcttctaagcaagtccaggctgattatttcaataaaaaacaggaggaaaataaaatgatatttggaaatataaaagacgttgaggaatatggatttctggaggaaaacgtattaaaatgtttagagtatgcaaaaaataatgaacttgtggattttgaaaaaggaagtcatgaaatagagggtgacaacctgtttgttaatattgtagaatatgagacaacaacactggaaaacagaatctgggaagcgcatcgccagtatctggatcttcatctgatgctgaagggaacagaggagattgatgtgaactttattgacaatatggtacagaaggaatttgtggaaaaagatgattttcttcctctggaaggagaaaaaaacagccatgtagttctttctgccggtgatttcctgatctgttatccaaaagacggacacagaacagctatacaggtaaacggacctgaacagatcaaaaaggctatttttaagatcagaattaaataatcagtaaacagataaaggagcggcaggatgaaggaatatatctgtattgatattggaggcacttctataaagcacggcgtggtacgagaggacggaacctttgctgttacaggagaaatgcccacacaggccatggaatatggcggccccgggattatggaaaaagcaaagaagatcgttgaagtttacagggaagagtatcagccggaaggaatctgcatttccacagccggaatggtagactgcgagaaaggaaaaattacttatgcagctcctctgatccccaactatacaggcacagaaattaaaaaaacactggaagatctgtatgggattccctgtgaagtagaaaacgatgtaaactgcgccggccttgcagaacattttgccggagcatcaaaaggaagcagcatcagtctttgccttactattggtacagggatcggcggagctattatcattgacggaaaagtatttcacggattttccggaagcggatgtgaggtaggctatatgcatcttccgggaggcgaatttcaggacctgggagcaagcagtatccttgtaaaaaagacagcggaatataagcgcatagatcctgcatccatcaatggcaaatatgtatttgaacaggcaaagcagggagactctgactgtatacgcgccattcaggaaatgtgtgaggttctgggaatggggatcgcaaacatctgctatgtagtgaatccggaggtagtagttctgggaggcggaattatggcgcagaaagaatatctgaaagatattctgagagaaagccttgataaatatctgattccgtcagttgcccggcatacccggatggagtttgcacagaatcagaatcaggcaggaatgctgggagcctattatcattttcggtcaagacactaaggaactgtcagccgcacataaaccggaagaggagggggagcatggaaaatattattccgcagatggaagctatttacagcagctttacacctttggaaaaaacaatagcggatttttttatccataatgatgagaaaaaagatctgtcatcaaaaagtgtgtcaaaaaagctttttgtgtcagaagcctccctgtccagatttgcaaaaaaatgcggttataaagggtatcgggagtttattttctgttacaaacagtacgaatcgggaatgaacaggcagcaggccagcgataatatcaagcttgtttttaacagctatcaggaacttctgaataaaagctattctctgatcgatgaagcccagatagaacgtatcgtaaagatcctgacagaaaaaaagagaatttatgtatatggaaaaggcagctccggtacagttggaacagagatgaagcttcggtttatgcgcatcggagtaaatattgaagccatcacagacgagcatattatgaaaatgaactcagttctgctggatggggagtgcggcgttataggaatcagtatcagcggaaaaacagagactgttatagattcgcttaaagcagcaaaaaaatgcggtgcagccgtagtacttatgacatcccgtaaagaaaagaagtttgaagatttctgtgatgagatcatgctgtttgcagtgaaggaaaatctggaaagaggaaaagatatttctcctcagtttcccattcttgttatgattgatatgctgtattccagaatactccggacagaaggcttcagaagaagagaaactctccatgaatatacaatggaagcgttggacgaaaaataacaggtggttcagagggcgaccggtcattatgactggtcgctttttatatacaaatccggaagggcatgtaactgcgtgcagtgaagagactggcaggagggaaaggcgcaggctctggtcagtttgctgtgggcataacaataaaagtagttcaggggcaggaaattgtgatatacttgcagaaaaagaaaggcttataagggaggagcacatatgaaggcaggtaaattaaacggacagataacaataggagtattttcatcttcatctcctgtttcggcaacagttccggtacgttatgaccggggcatagagtatttaaagtccagaggctatgagatgatacacggaagtttacagggaaaacaggatttttacagatcaggaactattcagcagcgggcagaggaatttaataatctgctgtataacgaaaaagtgcagattttgatggcatccattggaggaaataacacaaattcgattcttccgtatattgattatgaatatttgaaaaaacatccgaaaataattatcgggtattcagataccactgcgctgcttcttgccatttatgcgaaaaccggactggtgacattttacggtcctgcagtagcgtcttcctttggggagctgccgccttttgtggaccggacttttgagtactttgattccatggtaaaaggcaggatcacctgtccctatgattatccgatgccggagttctggacagatgaatttattaaatgggatgaacaggatcgttcaaaggcacagtacaaaaatgactggatctgcgtaaagacgggaatatgtcagggaaggctcatcggtggaaacttgaataccatggagggattttttggaacagagtatatgcctgagatccggaagggagatattttgtttatagaggattccctgaaggatgcatgtaccattgagcgttccttctcattgctgaggcttgccggagtatttgacagggtaagtggaattatcctgggaaaacatgagaaatttgacgataacggaacaggaagaaagccttacgaaattctgcaggaggttctgggagaaacagagattccggttctggcagagtttgactgctgtcatacacatcccatgtttacactgcctcttggctgccaggtaagactggatgcggagaataaaactgtttccctgctggaaagtccgtttgtacagtgagatcggagaaggcagtttctttttttacatttgtgaaggcgtctgaggtaaaggatgtgaaaaagtataatcatgcagtgtcagttttgtggagtgcaggtacagttttatttgaaatactggggattccgctgctgtttatcaggcagaattcgccctgggcaatttttctggtgctgggaacaatgttctgggtaataggaatcagcgttgcgtatatgcggattgaagccaggtataaaaagtaaagccgggcaggcaggaggcacagacggcatctgaaagccgggggaaaatcaggatgtaaagtcagttcgggagaatttctctcagggttttataaagatgacaaacttcttccggtaattacgcttgtaattcactttggaccagaggaatgggatgctccaatggggctgcatgatatgataaagattgaagatccggaacttttatcatacattccagactacaggattaatctgatctccccatatagtatttcggatataagcctggatcagtttcataccagcctccgggaagtgcttttatttattaaatattcaaaagataaaaaccggcttcgcaaaattgtaactgcagatccacattttttgtctgtggacaggaaagccggacaggtgataaagatactgacaggaagtgattttgagatcagagaagaggaggaaaaaattgatatgtgtaaggctcttgaggatcttaaggaagaagggcgtcaggaagggtggcaggaaggacgccaggatggcattagaaagctcatcctgaaaatactggccaaaaaccagttttcttatgaggaaattgcagacatgacagaaatgtctgtagaggaaatcatggaaattgacaggtcagctgccggacagcagtaaaaggttcggataaacaaagttttatcttgggtaaagcatgtattttggggctgttttctgctgaaatcatgaaaatgtaatttgctaaatccttataaatatgctagtatttaaagagcgattcgtacctgtcaggcattggcatgtctgcctgacagagaaggcagtttatcatttacaaaataccccaggaggattttttataatggaaaagcagaagtattatattacaacagctatcgcttatacttccggtaagcctcatatcggaaatacctacgaggctgttctggcagatgccattgcacgctacaaaagactggaaggatatgatgtatttttccagacaggaacagatgagcatggccagaaaatcgagctgaaagcagaagaagcaggcattacacctaaggaatttgttgataatgtatccggcgagatcaaaaatatctgggatctgatgaacacttcctatgacaaattcattcgtactacagacgaagaccacgagaaacaggttcagaagatcttcaaaaaaatgtatgcaaagggcgatatttacaagggacattatgagggaatgtactgtactccctgtgagtccttttttacagagagtcagcttgtagacggcaaatgtcctgactgcggacgtccctgtgttccggctaaggaagaggcatatttcttcaaaatgagtaaatatgcagaccgccttattgagcacatcaagacacatcctgagtttatccagccggagtcccgtaaaaacgagatgatgaacaatttccttcttccgggacttcaggatctctgtgtttccagaacttcctttaaatggggaattccggtagattttgatccgaagcatgttgtttatgtatggcttgacgctcttacaaactatatcacaggaatcggatatgactgcgacggagacagcacagagcagttcggtaagctgtggccggcagatcttcatctgatcggtaaggatattatccgtttccatacaatttactggcctatcttcctgatgtcactggatcttccgcttcccaagcaggtattcggtcatccatggctgttacagggcgatggaaaaatgagtaaatccaagggaaatgtgctttatgcagacgagcttgtggatttctttggagtagatgcagttcgttactttgtgcttcatgagatgccgtttgagaacgacggcgtgatcacctgggagctgatggtggagcgtctgaactccgagcttgccaatactcttggaaatcttgtaaaccgcaccatttccatgtctaacaaatatttcggcggcgtagtggaaaacaaaaatgtaacagagcctgttgatgaggatatgaaagcttttgtactggcagcgccgggcaaggttgcagccaagatggagaagctccgtgtggcagacgccatgacagaggtattcagtctctttaaacgcctgaacaaatacattgacgagacaatgccgtgggctcttgcaaaggaagaggacaagcaggaccgtcttgcaactgtgctctataatcttgtagagggaatcaccataggagcagctcttctggaggcatttatgccggagacaacagagcgtattcttgcacagcttaatgctgaaaaacgcagttttgaatcactggatacttttggcctgtatccgtccggcaataaggttgtagaaaaaccggaaattctgtttgcccgtcttgatcttaaagaggtaatggcaaaggtagaagagctccacccgcctgtacaggaagaaaaggaagaggagtccggaattgatcttgagccaaaagcagagatcacatttgaggattttgagaagctgcagttccaggttggcgagatcattgcctgtgaggcagtaaaaaaatccaaaaagcttctttgctctcaggtaaagatcggaagtcaggttcgccagatcgtatccggaatcaaagcccattacacccctgaggaaatggtaggcaaaaaggttatggtagttaccaacctgaagcctgcgaagcttgcaggagttatgagtgagggaatgatcctctgtgcagaggatgcagaaggcaatcttgcccttatgacaccggagaaaaacatgccggcaggagcagaaatctgctgataaaacggaactttattaagagtagaaatttatgtttgcggaggaaagaatttttattttttgttatccgcagacgatgaatatgagaaaaggcagatcatgtgttgtgtttcctggtaaacattgcaaggcattatgattctgccttttttctgtatctgaaaatggctgacagccaaatataaatttgcagttttatactatgctgctctgcttgacgtacctctctaaattttctatactagagggagtataaggaggttgtattgatggggaaggaattcagccattttgatcataaaggaaatgcagtgatggtggatgtttccggtaaggagcccacttttcggacagctgtagccacaggctatatttccgtgggagcagaaatcatggcggcggttacgggaggaaatgtaaaaaaaggcgatgttctcggcgtagccagagtagcagggatcatgggggtgaagcagacttcttctctgattccaatgtgccatccgctgccaatccagaagtgtgcagttgattttgaactggatcaggaaaacagccggatccatgcgtactgtacggtaaagacagagggcaaaaccggggtggagatggaggctctgacaggcgtacagacagcgcttctgacaatttacgacatgtgtaaggctattgacaagcatatggtaatgtcggagatccatcttgtagaaaaaacaggaggaaaaagcggagatttccgttttaaggacaaatgatagaccgttgtggaagaacgatagattatcttcggatctcggtgacagaccgctgtaatctccgctgtatttactgtatgccggaaaacggcgtcaagctggtggagcgaagtcagatccttcgggaggaagaaatcataagaatcagccgggttatggcacagcttggaattaccaggatcaagctgaccggaggagaaccgctggtacatgtaaggatgccggagctggtatgtcagatcaaggagattccgggaattaaaaaggtaaccctgactaccaatggaactcttttaaaggagcagatgaaggaacttgcagaggcggggctggatgcagtgaatatcagtctggatactctgaacagagactgctttcagaagatcacaagaagagatcttttaaatgaagctctggaggggattcaggaggccctgcgctatccgggtatttctgtgaagatcaactgtgttcctctgggaatagaggggcaggatctctgtgagattgcagagcttgcccggaaatatccggttcatgtgcgttttattgaaatgatgcctattggctgcggtatggaatttaagggaatgtcagaagaggaactgacagagcttctggaaaagcgctttgggtctctgactctttatcagggagaacctcttggaaacgggccgtccagatattatgaagcacaaggatttgaaggaaaactgggctttatcagtgcagtcagccataagttctgtaaagactgtaaccggatccgcctgacctctcagggatatctgaaaacctgccttcagtattcggcgggaaaggatttaagagagattataagaaacggcggcacagaagaggaactgacagaagcaattctggaggcactggaacagaaaccggacggacatcagtttttggaaaaggcacaggcagacgacacagaaaagctctgtatgtctcagataggagggtgaaatatgaagcgggtagcaatcataacatcaagtgattccggttaccggggagagcgggaagatttaagcgggccggcaatccgtgaaattctggaaagagaaggatatcaggtagtgtctctggatattcttcctgacgacagagaaatactgaaaaataaaatggcagaaatcgcggatcaggggctggcggagctgatccttactacaggcggcacaggcttttcggagagagatgtaatgccggaagcgacagaggatattattgagcgaagggttccgggaatcccggaggctatgcgtgcttacagcatgactattacaaagagagcaatgctgagcagggcttcagcaggaatccgcaaaaaaacacttatcatcaatcttcccggaagtccaaaggcagtacgggaaagtctggaatatattattgattctctggagcacggaatcgaaatccttacaggagaagcgtctgactgcgcccgaaaataaaagatttccggacagaagccgggaagactgaggggctcggagaggttttacaggggaaaatcataataataaagaaggtaatgaattatgggaaaagtaatagcaatttgtatcagtgaggagaaaggcacacagaaacacagtgtacaggaagcggaatttattgaggactggggaatcaaaggggatgcccatgccggaaagtggcacagacaggtaagtcttctttcgtttgacaagattgaagatttccgtgccagaggcgctgaggtgacagacggagcctttggagaaaatattgtagtagagggctttgattttgccgctatgcctgtaggtacaagattccgctgtaatgacgtaattttggaaatgacacagatcggcaaaaaatgccaccatggctgcgcgattttccaggctatgggagactgtattatgccaagagagggcgtatttacaaaagtaattcacggcggtgtgatccgtccgggagacgaatttctgtgttgtgaaaaaggacaggatgaatgaaaacatacagtatttttgagacacatgcacattatgacgatgaggcttttgagccggacagggacgggcttttaagctctcttcaggggaatggaatcggcaccgtggtaaatgtgtgcgcctctgtgggggagcttgggcgcacaattactctcacagaaaagtatccctttgtttacggcgcagtgggagtgcatccggatgatgcggataaaatgacagagcagacgttaaatgagatccgtgagctttcccgcagagaaaagattcttgccattggcgagatcgggctggactattactggcataaggaagaggcagcgcacgagatccagaaaaaaatgttccgcgctcagatggatattgccagagaagaaaagcttccgtttatgatccacagcagagatgctgcaaaggatactcttgatattgtgaaggagtatatggacgagggtatgtacggcggaatcatccattgtttttcctacggaaaggaaatggctgagcagtacctgaatatgggattatatcttggaatcggcggagtagtgacttttaaaaatgcaaaaaaattaaaagaggttgtagaatatgcccctcttgaacagcttgttctggaaacagacagtccgtatttaagccctgaacccaacagaggaaaaagaaacagttccctgaacctgccctatgtagcccgggctattggagaactgaaagggatttcagaggaggaagtgattcgcattacaggtcagaatgcagagaagcttctttttcatcgcataaaatagagtcatataaaataaaatcatataaaaaactgctgtggaaattgtttcaggtaaacaaaatctgcagcagtttttatatacgtttaagcttcctcatcttcatagccggagtcgtaatctccggaaccgtcatcatagccatcatcttctgtttcctcagaggaatccccggaaccgttatcatagctgtcagatcctccgtctgaattctccccggaaccttcgccggtatcatcagaagaggtattatcagaacttccaagctgttcataatactgatcggagctgacagaccatgtatcttctacataatttcctttggaatccgtcatgttcagttcatagtcaaaggaaacctccagaagattggttctggtggacggctccacattcatggacatgatctcatcgaatttttttcggagattatccagggtgaattcatcaccaatgatgtcccgcactccgtgctgagatgccagatcttcggtgtagtcttccagcatatatgggctaaagacgccctcatctttattatagtgcataaccataggctttacagtggcatccagaatttctacagtggtttttcctttcagcacagatttctggatggtaaaaccggccatgccttccagcagctccggaagctcctgctgagtggaaacaaagttgccaagagaataaaaaatcagcatttcgtttccgttatcgtcagacatgcgtccatatggctgaagtacatgaggatgaccgccgattacaacatcgaccccctgttccatcagaaaggcagcccactgcttctgatattcggtaggcatggtttcgtcctcttttccccagtgagcgacaaaaataaggcagtcgctgtcttcctttgctttctggatcatagaagcaacttcgcttttttcaaaaatatcgatcatataatcttttccgtctacataatctccgttgttagttccgtaggtgtagtcaagaaaagcaattttaatcccgtttacctccagtgtttttacagtatctgcatcttcctgactggaatggatgcccagtacaggaacttccggatagttggtcttccagaaatccagagtctgttctatgtagtcaggaccatagtcatcaatgtgattggtggctgattcaatgacgtcaaagccggccttgatcagagcgtcgcctacttctgtaggtgtggcaaaggaaggataggagctgaccgcactgtggtctgtggtaaatacagtttcctggtcgatcatggctatatctgcggcctggatctcatccttaacattctcgtagatatgctcgtaattccatgttccggattcatactggccggactctatcagacttccatggtaaagattgtctcctacagcgataacagtggcggtagatacttccggagtattggcctttttttctgcttctgctttttttattgcagcttctttttttgcagtttctgcaggcttctgtatcagattgtagtcaagctggcggaaaaggacaaccagaatgaccagaactgtcacagagcagaaaaaggcaatccgggaattacttttttctctgagattgagaggtatatttttattttttttcatggcagattcctttatattaatttcgtggattttcttatttattatagcaaaaagagcgcacttttgacaagtgcagccgaaatgttgctggttacccctaaaatgaaattttaaattccaccgcccttatgcggtggaatttacctccgcatagttgatatttactctttcatacagaaatggtatggttatctctccttctgacagcagtagaaggaggaacaataaaattacagagaaagccggaagcttcaaaaaagtgctttgtgccgggactggtttggggtataataaagaaaacatacagggaaaggagccagctatgaattctgttgaaacggtaaatgatgttctggtaaatttgtttaatgaaattatggacattgaggagagggctctgatcactcctgaatataaggacatttctgtaaatgatatgcatgtaatagaggctgtggggatccggaatccaaggagcatgtccgcaatagcaaaggatctctccgttacggtaggaaccctgacaatagctgtaaatcatctggtaaaaaaaggctatatcaatcggggcagaagtgaagaagacaggcgggttgttcttgtttccctttcggagaagggagaaaaagcctatcatcatcaccggatgttccatgaacgaatggtaatgtcggttttaaaaggactggacaggcaggagacagagactctgacaaaagctttgagccatctgcaggatttcttcagaaattacagagacgaataaaaaatatatgggggcgttgggcccccataattactgtgtcatatatttatacagaaccggaaagggaacagggccgatttccagtactttctgatgaaacagcctgagatcaaaagcctctccaagctcttctttctgcatttctttcagatcaagaaaattcagatatccccagtaatatttcaggtagttggcaggggtttccacgatatactgatagatttcctggataacatctgttttctggatgccaaaaacacgtaaaaaccgggctgtctgggactgattccatccatgctcatggatgccgatatccagaagtgaatagatgcacagattaatgcttctgttcagccagtacagagatgaaaggttttttgcatcactgtcctttataaaattatccgcataggagggaaggcaggattccacataggttgcccatccttctacgtaaccgccgcaggagatcagataacggatatcttccggctgacaggaggcaaaagaggtagtctgataaagatgtcccggaaagccttcgtgagcaagagtggaaacaagttccggaccggagtggcggcctgaacggttaatataaatcacgttgggggttccggtatctaatggcggcgtcagataaaaggcaggactcaggtaatcctccatagattcatgtacatagagaacctcataaggagcagacggtggttccgggaaatccgccgtgatacactggctgagcttttgaagaatctgctccggatcagtggaaaaaatttccggattttgctgaagtttttcaataagagcagaatttttgcgaagcaaaagctgcattgctttaaaatctgcggaaagctgtgacaaaagtcttttttctatgtcggcaacggaggcataggagccaacctgacttttcagcagatattcataatattcttttccgcctgaaaaatgggcaagcccccggcttgacactcctgttcctcgaagtgattccagtccctggataagaagctgataggcaggaatgacctgggatttcaggattttttcatgagcatccagaagttttttctgatcttccggggaaaactttccgtaatcttccagcttccgggcaaaaacctccagcatgtaattggaatcaggatcttttataaatgctttgcactgcatgagaatcctgtccagagtggcatcgctcataaaaaatccggcctgtgatttctgcttctcaaattccaggatactttgaaaatatggcttgacagaagaaagaagattcagataatctgcaatatcctgatcttcataaaatgcatattctgcaagcagaacaggaagctgtgcctgtgttccgagactgggggaaagcatttcttccagaagctcatttcctttgagcgaaagccgggtatgaaaatacaaaagaagcatatcaagagtaatttgattttcacgggaaagcctggatgcagaaaaagattttaacttgttcagatgattttcacaggctttgtatgtatcggacatatcagcgctgacagtgccgagaacaggcgcagggcgggtaatcccttctttttccggatgggcgagagagtaatggagagtcagcatgttttcggaaacctcttttttaaagatttccctgcagaaggtttcaaattttccattttcagaccagacatggctggaaaaatatccgatccccataccggagagaagaacaaggaacaatgaggcagtgattaaaaaggtttttttgtatctgcgcagaaatgcgggcatagaaatactcctggcaagcgtgtttttactattttattggaaaaaatacaaatgtatgctacactgaaaaaaggttaagacagataaaaaatcagcagaaaactgagaaacggaggaatctatcatgtcggaaatatatgatttagcgatactgggagcgggtccggctgggatcagcgcagctatttatgctgcaagggctcagcttaataccttgtgggtggaaaaaaagttcgctcagggcggtcagatcgtagatacttatgaagtggataattatccgggaatgcccgggatcaacggactggatctgggtgaagcaatggcttctcatgcggaaaaactgggactgactccggtaagagagaatgtcatatccatagagctggaggaaggaattaagatcatccgcacccgtaaaaatgaatacagggcaaaaactctgattcttgcaatgggagccgctcacagaactctggatattccgggggaacaggagcttgggggaatgggagtatcctactgcgccacctgcgacggagcttttttccggaatcagacagttgctgtgatcggaggaggaaatgtagcggtggaagatgcgattcttctttcccgaacctgtaaaaaggtttatgtgatccacagaagagatgaactccgggcggataaaatacttcaggaaaagctgtttgcctgcgaaaatgtggaaatcatatgggataccgtgcctcttgccattgagggagaaaacaaggtgactgcactgaagacccaaaataaaaagacaggggaagagcagcagatttctctggagggagtctttgttgctgttggaatcgttccgaatacagagctggttcagggactggtgaaagtggatgaaggaggatatatttctgcaggagaagactgtgctgcaagtgttccggggatttttgcagcaggagatatccgcaccaagcagctgcgtcaggtagtgactgcagtggcagacggagcaaatgctgtgatctctgcagaacgctttttataatatcagaaaccaatatgaaagatacaggaaagagcggcatgctctttttcagacagactgaatatgtaaaataaagcgctgaaaaacgaccatacatgacgtgtggtcgtttttttaaggtcatcagagagtgagatatttcagaagttaaaagtgaacttgcatgtttggttcgacagtctgtgttcatcggcttccaagtacttttttacaaaaacgctcagaatagggcataaaaatctgagcaaccggtcctacgataaaggcgcagataatagttccaggaccgaaggttcctcctaaaagaaagccggctgcaacaaaaaagcagtctgttaaaatacggacaagaccaaaagctctgtgggttttgtcgctgatcacaatggccaccaggtcattggggcctgttccggcctctgatttaatgacaatggtcatccccaaagcaagaatcatgcatcctgcaacaaggacaataacacgtattgcaaggggaagagagctgttgatatagtctccaaggattacagtgaaaagatcaatgatcggtcccccaaggaacatacagataatggttccgatccgtatgtagcttctgtcaatcacaagcagtaccagtatgatcagaaagcagatcatcatatgagtgcgtccgtgagtccagtgaagtgcatccggccatggaatgcttcggaaaattccctgtaccagaacattaaaagggtctgtgccaaggtttgcctgaataaaaaaggtaacccccagatgggctacagacagaccaaaaataagcagaatgatttgtttgactttttgcgtaaatgtcatagcagatagttcctttgcagtattttataaatattttatcacaggaggcccgattgtaaaagacgaatttccgaaaaggggagaacagaaggaacaggatttataattgttcacagcaccctgatcaaaaggcagtatgaacagcaacgaaattattacaaaaagtgccgtgattataacaggttttacagaacggaaaaagaaagggatataataaacataaataataatttcgtataggtagtgtcaaataatctatgaaaaacagagctaaagaaaaaggctcaaatgaaccttgaaaattgcagatatttattccgataagctctccgagggctcagggcgttgccctgagaacctacaagggaccagtcccttgacccattttcgggcattgcccgaatctatcctcgccggaaggcaggaaaagggtgcagttgccccttttctgctggacaggatcatccgggaactttttgtcaacagactttcgcggcatatcctcacagtcggcatagccgtctgttgtggtattccacggttctattgacaaccgttccgctccggtgcagcagtcccgtttttctgtatattcagaatggtctgttgtccaaggaagatcagaagctgccacttgcctggcatgttatccgctccctggagcatgtctacctggttgagtactttatatcccgtatgtttatgtggtcgcaggaagttatagtaagccacccagagagccaggtcatagttggcaccgtcgatgttatcaaatccgttcgtgctgcggtaagaagccttgtacgtgcggttcagccgttcaatcatctgtttgaaagggcggtgttctttagaaacagcatcgtcgttggtaagtccaagaacctgggtaacggtgaaggtaaagtctttaccaaacttttttgcgaattccattgcagcaagaggatatgcactgtaaccgtccgcaacaaatttaaagttttccgggagttttgcaagcccatggaaagccatacgcatggcgaggatgcagggaccaaccccacggttatcggatacctgatagccgagaatggaacgtgtggcggcgttcatgatcagccagacgtaagttttgatgccgcggatcttgatataggtttcatcagcagtgaagacatcccctttctcgtaaggatactggtcgacaaagggcttgatacagatggcagcggttttgcagtagttagcgatctgctggtgggaaatgctgatgttatacaggtcttttaaagcttgtgacgtcttgcgcagggaaagccccagattgacgtgcagtgtcaggcataaggacatgacatgggcattgtgtttgttgaatttaagggaagaggcatttttaggcagggtatttaagcccatgctgaaaaaatccatcgtgaactcacggtagatgtaatggagcttatatttatttttaccataatcctctgcgagatctgccttgtcaacttttttgaggttgtgaaggtagtaaggacattcgggattgacgcatttatggacaatgaagtgtttcctgtcctttttgggaaccagggtgttgccgcaatgaggacatcgcagctttacggaagagaacctgctttcatcaggagaaaatctggcatcacagattttacacaggagttgtcctttggaaccgttattccggtagaggaagggtttgggagcatcacagcgtgggcaggtgcaggaatctggaatgtcacactctgaccggcggctgatcgggcggatctttttaccataacgcttttcgtagtaagggatgagttctttgtaagtccagtcctgacggaaatccgtgatcagagggagtgaatcaatcttgaacttttgatatttgggagagtgggaatcatcgaaggcccactgcttgagagggatatatctgcagataaaatttaaaagccagcagatttgttgatgttggtattgaattagctgaagtaaataaagtataatgttcatgagcattggctcctttcggggatgttggtttggcgattgacattataccagaaaagggaggtcaatgctctttttatttgtaaacctcctgtaattcaaggttttaaaggattttagaacaataaaaacagatagtttttgacactaccttcgtatagcgggaggaaagaaaaatgaataataaaaaaatgatcgcagtatttatagcattgggaatgacaatgatgtgcttttcgggctgtagtctgacagaagaatccacatcagcccctacagcagcgccaagtccgcaggcaacggcaaccgctgcaccgaaggcaacagcaacgccaacgccaaaggcaaccgctacaccgaaaccttctagcacaggctctcagagcagcgccggttcacagtccggaagcagcagttcctcacagacaggaaataattcgggtaattcttcatcaggaaacgaagcagaggaagaatatgaaattcaatacatcagtggaaatgtaatgactaatgatgacacatcaatgactatagagacaggctctgatggcaatttttatgaaatgacttttgatatcagtgatgcagaagtgaatattgaggaaaatgaggtagtcggagccagcagtcttcgaacaagtctgaatgtggatgtggattattatgtgaaagatggcatgaatattgcaacctatatacatagtgatggaattgaatatttttctccaagttttttgtataagtatgaacaggaacagcaaatgcaggaaaactctcaggactatgatgattcctctgattatgaagagcctcaggatagtggagatacagaggattacggagaggattatgtagatgaagatgcaaattcagaggcagattactaggagacagaggtaaaagagaagagggagctgtattatacagcccccttttcctgaaatacaagttagacatcggcaagtctggcaaaagtatctcgccctgccattccatctgcagctaatccctgagaagactggaacttaattacaccctgttttgtggatggaccgaagtcgttatcaataccactgttcagcgtaatattgtgggcataaagaccaatctgaagaactccaacataaagattattagcgccttcagagaggacatgggcagcacaggcattggaagtatttgttccccagatgccatcggttgcaagcccggcaccatatacggagttcagggcggactggattgctttaatataagcttttttgcaggctggtccccagataccgtctacggcaagtccggcactaaatttgctgtttaaagccttctgagcagttgtaacaggagaagatcctgtagagccggaatctttgccaacatagtcctgatgcatatatccgataccaattccggaaactcttacatgaacccatacaccggaacttgtgccgtcaagttccagcttagtacctttggataccatacccattacagtaccacccggagtcttacgcacatagacatcgtcaccagtacatacagcggttcccgtggttacccatgtagatggaggaacaggatcctcaccggagccattgatagaagttacaatactgtagtccggtctggcgaataaggtaccactgttgacagaacgatttttctggaaaacacctccgccattgggatcaattccgcttccaccgcttgtgtttccttcaatggtagtgaactggctgccattgacggaaataactaaaccagtgtggtagtaaccctggctgctagagtagaacataacaatatcaccgactttaggagtggaataatgtgtaaagcgggttgacaggtcataaacggaaatatacggccagtgttttaaaagttcaattgctttagatttaccgaaagctttcataaacacccaactgataaagccggcacaccagtaagaaccctgatattctggagcaacatctctccaatatttggtataatttccattaccggcatttgctgttttatcgtcaagatctttgttgcttgctttttcgagatacccaatttcagcttttgcgattttaatagctgcctgaatggcttctgcagcagttaccttataattggtaatgtgtgttttaagagcattgtataccattttctggcggcttttataagcgccaacctgatttccggtgtccgtctggcaggcagcataaaggtgatccaaagtatagggctttgcagtttttgctaaaattctttttacagcggaagccccgccctgatgtctgaaattggcgcacatcattttggcatctatatatgtaacaccaagagcagcagcttcttttacataagcttccatctgagtgtctacaagtttgtcctgacaacgatgacctacagcagagtcaataattttaacaatagctttggcctttgcagaagttttggaaattcggtaattggaccagtctgttttggtaaggtctgaagctacaccggcattatcgtatttcttaaaagttgcagcatctgcagatttgatattcagaagaagagtacgggcttcatttccgtaccactgtccggctccaatagtgattgcatgttcagaggaactgtttgtataggcttctgtgaaatccgcatagtctttctgtccgtaaacctgtcctcctgtttctactgcatagataatgttacgcattacaagtttttcgtgttctgtcattgttttttcatcctttcgtgatttttagaatttgcaaattcactttataagaagaaaaaaatatgacaggttgaaacaaaaatttctaaattagtttcttaatcatctgttttttcttttgtaattatttttctgtaataaaaaatgcgtatttttcctgctaccatgatactggatgtaaacagaagagttatcataaaaaggtgaagcagatgtttttgttttataaatgccagaaaaattatgaatacttccattatccatatgatatggagtagtttatatttgcggatgcgtaattcttctgtagtgaaatcttctgcaatgctgggaaccggagctattaaaaagataaacagcagtgaaagagaactgattaatgtgcagggaagtatttccaggcggatatactgtaacagttccagaattcccagcagagaaaggatggaggtgataaaacagggaagaaaatctctgaaatgaaagccgcctccatattttctcattagcagaaaaattatatagaagatcagataatctgtaagctggttccggaaagcagtccagaagatacagaaaagctgtacacttgcagtttccagaaccgtgacaagcccgtagtgataatagggcaagtcattttctgaaacatccattttgcgtaggagagtatcaatcatggcgtttacgtttattggaaatccactgctccagatcgtctggcggaacgttgtcgtgaaaaatagtaagacatatggatgctctgcaaataacagagaaggcacaggctgaaagtaaaatgtgagataaaagaggtttaaatttttttaacataagatattctccttggtttgtgataaagggattataagaaaaaaagaaaagcagtaaaaacagtatcgtataaaatgcatattttatgacatattaaacgtaagcgcttaatttttaggtatgatagaaaaatccccgactacttttcagtagtcggagcaccttgacaattcacatatgattgatttgatccgtttgcacgacgttcgatttcagctttgacggtttccttccatggagccagaagttctaattcatcatcactcattctatcatcaggtagtttttccagcagataagtaagatagtgatagacgtttacgccattggcttttgccatctctaccattgtgtacacgatagcgctggcctgggctccgtttggtgtgtcacagaacagccagtttttacggcctactgtaaacggacggatcgcattttcactgagattattagaaaaactgcagcgcccgtcttcgagataggtagtcagataggagcggcggttctgaatgtaggtgacagctttatccattctgcttccacgggtagggttctgctgatcaagccacgacaaaaagccttctactaccggcttttctttttcaaggcgagccttttttatagcatcgaaggaagaatactttgatctgatcacatcttccagatggaagagctggttaatgtacagcattccctgtacagatggctgggtataatccagtgcttttcccttagggatggcatctgtcagatatcttctgatgtgtgcccagcaggctgtgcgtttggcatccggtactttattgtatccgctatagccatcacacatcagataacccttgaagccgtgaagaaaatctacggcattgtccccggcccgggtctccgagtatttatagaggataataggtggtcctccgtcttcaccgctgcggaacagccacatatatgacttggtttgcgcgcggcgttccggttcatgcagaacctgaagtggcgtttcatctgccatcgcgaatccacgttccagaagtttcctgtggaagtattcgtacataggaagaaaaaatgcttcagaattccggatcacccagtttgccatagtagctctggtgatctccacgccatactgtttccagtccttttcctgacggtagtatggaagaccattacaaaacttctggtacattacccaggcaaccgttccggcagaagccattccataaagcatatgggatctgccatcttttccttttttgataaccggtatatcctgaagcctgcactgcgggcactcatagctcttactgtagtattcatatactttcagttttgccggtacaaaaaccagctcccggcggacaaactcttccccgatttctttcagtggggtaccacaggcagggcagagtttctcttcctcagaaagttccagatactttttctcaacaggaactcccttaaaccgttcagcatctgtagctcttgcttttcgtttttttgctgttttttccggaagaagtgcctcaagatcctctgcttttacagcttctggatcctgttccagttccgcttcattgaaaaagtttaactggcctggaatatcgatggttcttttttcactggaggtgccaaacagttttttacggagaaggtctatctcttctttcaggttatcccgttcctgggtaagagcctcttcccgtttattggcagcatcgacagttgcctgaagtgtttttatcatctttttgagatcgtttatcatgtccttcagctcacggagctggatatctttggaactgtctgccactgctttttcctcctgtttctgatgtttccattataccagaaaacagtggcttttcccagcaaaacagcggatttaccagaccttgaaagtgccgaaaatacagcaaaaaacaagagttttatgtgcatcttttttacgttgccttgatcgcttttggctgctcaatatcaatgccagacatcagccagtcgaactcccgccatgtaagattccggacctcagatttattcctgggccaccggtaagatccctgggcggtcagtcttttgtagatcataacgatcccgtcaggttcttttaaaatagctttgatacggtcgcatttacgaccgcagaaaagaaaaagtgcatggtcgatctccatcgaaaactgttcctggatgatcgcacataatccatcaatggacttgcgcatatctgttctgccacagacgatatagatcgcatcaacacttgagatgtccgctaacataatgactccttcagcgtatccataagcatcttcagaagtaccggtttgatctcattactcattcgtataagcaatccgtctgcttcgatttcaatcgtatgtgaattgtcaaggtgcataggactgtttccattatctggaatcagtcctgccggagaatactccggttctatagcaatctggactacatcctgtttatgggacgtaaggtcaagagtgctggcttttccaactggatccggtatctgacaggcttttttgcggagacgggtaactgcattgtaaaaacagctgggagatatcccatgttcattacaccatgcagcatctgtcaggccactttgtctgcattcggtgaccagttccatccattcgtccagggaacgtcctggagcacgtttattactcataatgaaacctccaaatatagtaaatttctatctcctatcaagcggagtgtagtaaaaatctatttgctatcattatgagttcaaaaacgtagacagtaaagctacccaagatttaagcgcttactattaaacatatatatgccaatagcatattatgctgttaaaattaataagaagaaagagggagggtaaaatattgtttaatccagtaaatattatatgtttcatattattaagcttatctatgcaaatatatatggatatattttttgaaaagaggcattggcacttaatcttagttaatccagtaatagcatgtatgacatatataatattaattatatttccaaatgttaacccatggggaaatatagctatagtaataatctttttttctatttatgggatgtttatatatcagggaaggagagataagatatttttccatattgttctgtgggaattaatgggatgtttatgcgaatatatagtgttgtttattctttcgttgtcgtatgcccaggaagttatttttaaaaaagaatattacgattttgcaagaacggtatctcattgtctgctggtttttcttacattatgcatcagcaggattgtttcttataaaaaaagccatggagtaaaaagccagagcagtgtgattcttttacttttagctacagctacagtgattgttgattggggagtatatcagatatatatgtatcctaaaagcacatgtgccgattattatgcaatattaatagcatcaattatgatggctatgtctatagttattattaagatttacgaaggactgggggagaaagcagagctggaaaccagaaatacaatttatcagagacaggtagaagcttatcgggtgcaaagttccgagagagaggaaacgctaaaagagtttcgtcgtctgaaacatgatatgaagaatcatctgatctatatggatgaattgattcgccaacagaagaatgaagaggcctgcagatatatagataaattgctggcatcaagaggtctggtttatcagggagcagtgaacagtggaaatatgcttgtagacgggttggtcaattataaaattccatatataaaatccttacatattgatttccgatcagaggtagtgattccttcaaacctggaaatgccggaggacaatttatgtattattatcgggaatctgctggacaatgcgattgagggtacccggcaattacaggaaaatgaaagacatatattttttaaatttgtattgaaaaaagataacttttttctcatgatacagaattcctgtcaggaaaatgctgttatcaggaaaggaaattatttcctgagcactaagaaggaaaaaggtcatggaatgggaatattatcagtaaagcgtgccgtagaggaatgtaagggagatctctgtattgatgtgcagaaagggagatttcaggtatctgttattttgccaaaacagaaagtaactataaaaggggatgaagcaaatggaaaaaataattaaaaaatatgcggtatgtattggataccggatgcggcaggagaggaaaaataagaatataacgcagcaggaactggcgcatagattggggatttcttactcgtattataataacatagaaaaaggcaacagaagctgtccgattgaagttctgattggaatatgcagggagtttggaatttcagcagacagaatcctgagagactttattcctgtggatacagaaaaggagatcagatagtaaaaatatcaaaatgttgtcttatagacggaaaataattcttatagaaacttaagtttatagatattactccttacaatggtagaaaaaggagacgttgtatggagtataataaaacagaactgaaaaagtataattatcttattggacagaaaataaaagctatcagggatttaaaaggttttaagcaggattatgtttcagaaaagctgggaatatccagtggacattacagcaatattgaaaatggacataagacatgcacactttatatcctgattaaactgtgtcagattctggatacaacacccaatgagattttatcggattgtgtgtctttagatcatgatgaaaaagaaacttttattgttgagatgcaaagatctttaaaagcggatgaaaaagaattcctggtggcgttccagatgatcttaaataaatatctggaggacaaaagatgataaatattgccatttgcgatgatgatatggtttttacaacccggctggaagagcttattatggattttagtaaggcgtactcctttgacatatgtatttattttgatggagatacattactggaagcggtaaagcagggaatttgctttgatattatcctgatggacatagaaatgaagcgtatgaatggaatcagcgcagcaaagattattcggaaaatagatgaggatgtacagctgatttatatttcaagtcatgaggagtatgtgctgcagctatttgatgtaaacccggtgggatttttgaaaaagcctctttatccagaatagtttcgggcatgtctgagaaaagcgttaaacacgatggaaagaagagtaatgtatttctcttataaaaatcattatcaggaaaacaaaatacggatgaaagatattatttattttgaaagtgtgtatcgaaaaatacatattcatacgctgcaggggatggattatttttatggaaagttatcaactgttgaaaataatttgaacaattctgtgattccttttatcagaatccaccaatcatatcttataaattatcattatatttctcagtataaatcctcaaagattattatggaaaatggggcagagttgatggtaagcactgcatatagaactgttgtaaaggaaaaaatgcatgaattattaaggctgggctgaaagacagacagcgatcctttagggaaggctgtctttgtcatttagttctttttttaaaacagaaatatatttttttaatttttgagggataggaacacccatccgtcccgcattttcaatgatagacagaagttcattcagagagtaccatactgtaataaaaacacccagatagaaatgggagggatagacaatcccaaggctggaagcggaattgtgtaataatccatctacagagaaagcgcttccgataaccagccagcaccctgtctttttcaggattcctaaaaatcctttgcgggaattccagccataagagatattatccgggtgttcaatgccttctttacggctggcgagcatacctgtgatataatcaatgatcataagaaataagagacttaggattaacataccaaaagtctgaaattttgaaccaatccaggtgagcataccggataataagagctgtatagtgtgttcggatttcatgtgaattttctcctttctgacaaaaattctttttttacacgatttatatactgaacagacagatgtagcttatctgcgatttcagaggttgaatatttttccgacagaataaaattcagtattttctgtctggttgaagaaagtgatctcatatattcctgaagtgagagattcagttctataaaaccgaagtcactgtatgcaggaagtgaagcaaaggtttcactttcagaggactgctcgtattcggagtgccgaatagacatacggcacagatatttgaagtgatttttcagtgcattttgaatgaaacaaatgcaagctccttcattttggatatattttatggattggatagctattaaaagagcaagggtcagttcctgctgtgcatcctcgtattccatagcatgacatttgtatgcatacttgcgaatcatgggctgaaatttgagaattatttgttcctgtgcagaggtatcgccgttttttgcctgttgtaatgtatgaataaaaatagtattttccatgatttttctccttttgttagaaagaagaaaaaacagttggatttagaaacttaaatttagaaaaatattattttagataacaaaagtaaagcagataaaaaaagaatagaaataacgtagttttagtaagaaacagtaaaaagggaatctcattggaacaaagagtgcttgacatatacttttttgatatgtaaaaataaccgcaggcaagcgaaaggggagttaattgtgatggtaaatattgctgtatgtgatgacgatacacagtttgcggctgaactggaaaaccggatattatcctatggaaaacagaaagctgtcagtttagatacagaagtcttttcagatggagacagtattctgcaggcaatcctcaacggcggacagtatgatcttgtttatatggacattgagatgggtaatagaaacgggatcagtacagtgcgtgagataaagaaaatatctcctgagaccatggttatttatgttacttttcatgaagtttattttacacagatgtttgaaacggagccttttcgttatcttggtaaaccattggaggaggaacagtttaacagataccttgaacaggctttaaagaggctcagagagcgcttatgctattatacttatacaaccggacacagtacctgccgggttcctgtacgggatattttttattttgagagccgcagacgaaaaattatacttcatgggaaagacagcactgatattttctatggaagattgggggaaatacaaaaagagttggaaaagggcggccgtccgtttatcagaatccatcagtcatatcttgtaaatccttatgaaataaacagatattatccggatagagtagaaatggttgggaaaatgcttcttcctatcagtgagagcagacagagagaggtgaaagaaaagttccattcatttctgagagagttataaacaaaaatgtaatcattctgtaataaaatttgacaaaacaggcatttctgtgataacatacgcaactgtatgcagcacagagatgcctgtttccggttttggtacggatatcgggatatttctgatgaaaacaaggatgaataaaaaggagatttccatgataaaaaagattgcagcagtgatgttaagtgtttgtatgagcaccgccatggcagcaggtgcgcaggcggcagattttaccagcggtgaggaaacgctggagggaacctttactgacggcagcaaagatgatcagacaggtgacatcagtgaaattgcaaatgatattgtagctcaggctgaagagaaggctcaggaataccagaagctgaaggaagaggcggacagagcggctgcaaaaaaagcggctgaggaaagagcaagaaaggcggaagaggagcgcgtggctcaccgtcaggagattgtggattttgcaatgcagtttgagggcaatccctatgtatatgggggaacaagcctgacaaatggagctgactgttccgggtttatgatgtctgtgtttaaagagtttggatacgagcttcccagagtggctgcggcccagtatgaatcgtcacagaaaaaagagctcagtgatattgaggtgggggatcttgttttttatggcagcaatatttatcatgtaggcctgtatatcggagatgagaaaatcattcatgccagtacctctgcatcagggatcaaagtctctgattatgattttgaaacaccgtctggtgtcggaacttatctgaaataatcgagggtttggcaaattgcacaaagcctgtcgaaaaatgtggattgtatggatttttgtacaaaagttatccactgtaagaaaacgtggaaaaccctgtaaaatcaagttatgcacaaagttatccacattatccacatgaataacatgtggaatacctgatttacataaaaagacaagaaacagatgttttggttaataatgataaaaatacaaaaatcgacaaaaaccaacagatttctattgacattttcaatgtgaaaatatagggaaatattttgtacaaaagagtgattttgctgtttgaaagaataattatctgacaatattaagaaaagttggcgtgtataaacaaaattacatcatatagtatgctgaacataatggtatacattttatagtgttttgagttatggaaaaataaaaatccccggaagagaaataaaattctcttttggggatttttactgcattgtggataaagtttaaaaaagaatgttatccacaggaatctgctgacgcagcattctgtttcattcgtttgataaccttcagtcttgtaaattcctctcgctctttttcttccagagcattctggatatctctggttaatgtctcgtatctggggattgtaatatttttaagagcgtttgcccgcttttgagtttttttgatgttggcggccaggcgaatggctgcattttcgatcatggagagccggatggacagctcttttactttttcgaactccgcctttgcctgatccagagacatttttgtactgtagtaggcataagtgggggtgttggtactctgagcgtcatattctaccagtgggatttctgttcccataacgcttcgggttttgatccggatggagttttccacaggaacagtataggaaatctgctgaacaaaagcgatgccgatttccatatttgccttctgaagagccgcatatgcagtccggaaggtttcgtcaatctgtgtctggatatcctttgcctgatcgataaggtccatcatttctctgatcagaatgtttctttttttgtccatcagctcaaatccctgacgggaaagagcaagggaattttttgcaagtatcagatttcccttggtgggaaaggtatttggatccaagaaaccacctccctttcttatctgacggtttctctgtaatatttgttcagaatcttggtatcaatacgatccagctcttcttttggaagaagtcccagaagctcccagcctttatccagggtttcggtaatgctgcggttttctgtttctgtctgtcctacaaattccgcttcaaaagccttgccgaacacaaggtagcgcttatcaagaggagagagctcatcctcaccgataacggatgccagagctctggcatcgcctacttttgcataacaggagaaaagctggttggccacatcctgatggtctgcccgtgtaaagccttctccgataccgtccttcatcagtcgggaaagagacggaagcacattgataggcgggtaaattgcctgcccgtgaagctgacggtccagaacaatctgcccctctgtaatatatccggtaaggtcagggataggatgagtaatatcatcattgggcatggtaagaatcggaatctgtgttacagatccggtgccgccctgaacgattcctgcgcgctcataaagggttgcaagctcgctgtacagataacccggatatcctttacgggacgggatctcgcctttggaggaagaaacctctcgcattgcctcacagaaagaggtaatgtcagtaaggatgaccagaatgtgcattcctttttcaaaggcaaggtattcggctgccgtaagagcgatcttcggtgtcagaagacgctctactacaggatcgtttgccagattcaggaacatgacaacatggtcggaagcaccgctttcctcaaaggtacggcggaaaaattcagctacgtcatattttacgcccattgctgcaaatacaatggcaaagttttcatcggagtcgcttcccagagaagcctgctgtacgatctgcgcagcaagtttgtcgtggggaagtccgtttccggaaaaaataggaagtttctgtccgcggatcagtgttgtcagaccgtcgatagcagaaatacctgtgttgatatagtttctcgggtactctctggatactggattcagaggaagtccattgatattcagttttacttccggggcaatatcgcccagtccgtcaataggctgaccgattccgttaaaggtacgtccgaggatttccggagaaagtccgatctccattggatgtccggtcagtcttgtatgagtgtttgtcagggacatgctttcagttccctcaaagacctgaataacagccttgtcctcgtaaatttctacaatacggccgattttctgtgttccgtcgtccatatgaaattctacgatttcttcataggatgcgtttttaactccttccagaacaaccagagggccgtttatctcgcttaatcccagatattcgattgccataaacttttcctcctgtcagccgtttttccttaatacgttttcatagaattcttcaatatcttttttgtactgatcgaatttttcaagctctttgtttggaacatcatatttaatagagatgatccgttcaaaaatattgtcctcttttaatacggaaaccggcatgccgcggtttacaagagcgcgggatttctcgtacagataaaggatgatctccatcatctggaactgtttttccattggaacacaggtatcctcgtcatggaaagcgttctgctgaagaaagcccagacggatcactcttgcgatttccagagtcagcttctgatcgtcaggaagaacatcgcttccgatcagctttacgatttccatcagagagctttcctggttaaggatcgccatgatctgatttctgtctgtgacaaatttcggggacacatgggtgcggtaccagggggagagatcctccagatactcgctgtagctggtaagccagtggattgccgggaagtggcgggcataggccagagatttatcaagtccccagaagcagcgcacaaaacgtttggtattctgggtaacaggctctgagaagtcgccgccctgaggggaaaccgctccgataatagaaacagatccttcggttccgtttaagttctgcatcataccggctctctcataaaaggcagaaagcttggaggcaagatatgcagggaagccttcctctgcaggcatttcctctagacgtccggacagctcacggagagcctcggcccaacgggaagtagagtctgccataatggctacgtcatatcccatatctctgtaatattctgccagagtgacgccggtgtaaatagaggcttcacgggcagcaacaggcatgttggaggtattggcgatcagagttgttctgtccatcatcaggttgccggatttagggtcgatcagcttgctgaaatcttccagaacctgagtcatttcgtttccacgctctccacagccgatatagataataatatcagcgtcagaccatttggcgatctgatgctgcgtcatggtctttcctgtaccgaatccgcccggaacagcggcagtaccgcctttggcgatagggaaaagggtgtcaaggatacgctggcctgtaacaagaggaacacttgccgggaaacgcagctgtgtaggtcttggaatacggataggccatttctgtgcaagcgtcagatcctttgtagtcccgtccggcagttcaatggttacaataggctccagaatgttatagtcgccgtccggagctgctttgatgacagttccgtcctggatagaagggggaaccatggatttatgaagaatggaggctgtttcctgtgtctcggcaatgatcgtaccgggacccacaacatccccctccttaactgtaatatgagtgttccattttttctgtgtatccaaagaatctacactgacacctctggaaatatattttccggaggattttgcaatttcctccagaggacgctggattccgtcaaaaatattgtggatgattccaggccccagaagaacagagatggcgtcgcctgttcctgtaacggtttcaccggggcgaagccctgtggtctcctcaaaaacctgaacggtggtcattccctttttcaggccaatgacttctcctaccagattgtcctttcctacatagaccatctcggagattttaaatccgggatcgcccttcagataaataaccgggccgttgacaccgtagataatacctgttttactcattcttcagccctccgtcaaatttgaattcctttcgcatggactccagtccttccagaaaagagttgtcgatcatgatatttttctggggaatagcagcgcggataccgccgataaaatcatctgaagaaacagtaagctccgctcctgttttctgtgaaagagcctcgagcttactgctgtcaccggaagataaagaaatctgaatttcatcctcgccggcaaaggatttcacttcctgaatctgtttacacagataatccatatattcaggagtttccataaaagcctgtgctttctgttttacttctacaaaaagagtttctttcagctcttcctgttttctggaccagccgcgcttgagagtgatctgctctgcggccagagccttgttgatctccctgcggacatgctcggcttcggcctttacctcagcctcagcgctttgtctgcgggctgctttatgatcttccagcatctgagaaagagattctctgtgttcctggatcgcctttgcggcatcctcctttgcttcctcgacagagacctcataaaaatgctgcaacttttcatctattgtcatgttttcacctgcctataatttcagtccgattgcttcgttgacatatgaagtgataaaatccggtttacgtcctgttccgtgcctgtcaggaatttcaatgatcaggggagttttgtggtgaagccggacttcatcaatgatctccgggaattcccgtccaaatttttccgtaaggagaatgatcccgatttccttgtctgcaatagtgcgctccagggcttcccggagctcatcacgttcatggacaaccacgccctcgacacctgccaggcgcatgcctgtgtaggtgtcgatgttgtcgctgattaaatacattttcataaaatatgcctcttaaagtttaccaaggatcataaaggaaatgatcagtccgtaaagggcgataccttcggccatagctacgaagataatagatttaccaaaaagagaaccgtcttcgctgagggctccaagcgcagcgcttgcggagctggcaactgcaataccggaaccaagaccggaaatacctgtaacaagggcagctgcaatatagccaagacctgtagccagaccgctgttgcctgatgcagcctgtacgcttgatgtgcctgcaaacattaccacagaggcaacaaggattacgccaaagaacataaagcagtttgctgcaagtgtgcgtttatagcgttttttgtttttctcaccaaggaaaaagtagctcacaggtaagatgatgctgagaatcagtgcgattgctgttacgatttgaatgatcattgtcatggtaatatcctcctgaaaataaaattatttttacgggaaaaatcccggctgtttttattaagcgtttgctttctgtccctttttcttaaaaggaaggaactcgcgtccgtttcctgcatagaagcggctgaagatctcgtagtattccagacgaagaacctggataccaacgatcagaccctccatggcgcacacaaaaatgttgcccagaacaataacgatccagttggggctgccgccctctgtagctcctgccagcatcaggacaacctccatcattgccgcatggcttacggcgaaggctccgatacgaaggaaagaaagggtgtttgacaaatagcttaacagtacctcaaaaagttcaaagaagctctgaacaaagaacatccccttttgttcaggaaggatctgtttctttttctctaccagattggtaagaggctccttcaggaacatcagaatcagcggtacgccgaacataactgccagaacagctgctgcgggaagctttttgccggaaacaagaagcactgcggacagagcaatggacccataaaatacaagcccggcaacagcgttgctgtcaaaccatgtacgttctgtatcatgattgcggacagcattgatgatattaaataccatacagatcaggatcagaagcattccgaatccgatagcgatgacaaatactgcattcagccgtcctaccagtggaacgtccatcattgccttcatgggcttcagccatatggcgtggagaatttcttcaaatccgaagatacttccgtacataaatccgaaaaaggtggaaaatacaccggcgcagctgataatgcctgcaaggtccatgtgctttttcttatacaggaacagaccgccaaggaaaaggatcagtccctgtcccacatctccgaacatggctccgaagatcagggaataggtaatagccacaaaccatgtggggtccagctcgttataagcaggaaggccgtacatttttacatacatttcaaaaggccggaacagcttcggattgtgaagctttgttggcggtgtcttttttgccggtgactcttcgtcttccataaggcagaagattttgtcatcgtctctgatatcctcctggaaagccagcgcgtctttttcggtcatccagccacacaggatatagaaaggatttacttcgtctcttgttcgtgtgcaggctgcaagcttacggatatcaaagcttgaagagcaggcatccaatgcagcttttgcagaaacaatatcctgacagttatctttaaggaaactgtcggcagctttctggttggcatccagacctgcgtggatttctttgtgacgctgctccagttttgaaaatgcctccctggcagtaccggtatagcagtcgggaacaaagatctgctcaaaatgcatggatgaatagacggcatgtaccttatgagcctgatgctttggcacaaaataaacaccgtaaatatactgctcattatcactgcatttgataaacaaagtatccagggtatcataaatgtatttctcgaatttctggaaatactgtttttcaatccgaccaaaacggtaatggatataactgaagttcagaatttcagatatatcataattaagattctggaaaggacggatgatctttagggaatccagcatttcagcatgttctgctttcagcttctgacggacgtcagcaagatggccggattctttctggagccttcggaccacagagacagcggtttctgtatccatctttttgggcgtgatgctttccgggtcttccaattgttcgtaaaaactgttaatggaagtgagagcttcacgataaggattgatttccagaaacggtgacagattggcaacctctgtcagctcagaaagagcattttccagatgaatctcatatttggaaagataggtttctgtcattctgtcaatatctgcctttggccctgtgatgctcaaaaatttcattttttcaatcacgatgttacctccgggttgttaattattacgaataaactgaagcgcttcttcaggctgtacaccgtaccgtacacattcaatggcaatggtcagacggtttacttcatgctctttgtgatacatataggaatagagaagggccacggaataaggatctctccgggcttctttttccagagtactgcggagcatacaattgtaaaattcctcaagattatgtgctgccagatgttcgtattttttgccgtaataggttttgcggaataaaggccgtgcctcttcataggaggcggcttccacaagggtgttgatttcttcttttttcaatttgtaattcattggtatcagcagggcgtagatatctgccggcgccatatgaaaataccgtttggaccggaaaataaactgcagattcagcatatcgaatttttctccatatgcatgagtgatctgtttcagatcatttccggaaaaaagttttttgcggacattccagatctgtgtaaaataataaaggtcaagaaccatgccgtagtcaaagagcagcgcgctttcgtgattctgaatctgagacaggggcagataaaattcatttccctttaatgccgtgataaattcttccatagaggtacaggcgattagcctgtcaagatccatattggagtgtttacggaaaaaatcacggtatggtgtcacatctacaggatctgtgtttcggtgatcaaacaggtctgtcatgatttccttcagaacacgaatctcatagcgcttggaataaagatccaggaatttgcgctgctctggattggaaaactgatagatacgggaaaaattgttaaaaacagaagcttttaacagcttttcaatctgtcctctgtggagagtgttttcatccagagaagcccaggcctcttcgtattcctttgtatgcttcaggtaagtgattacctgaggaacactggatagctgaagaatttcctgaaactgttcttccgttgtcagcttgctctgcatggcgcggatctttgctgaaattccgctgtaggagaggagatttcccatgctgtcttatgcctcctttttcagtttgcaagaagtttccggaataaatgctctgaaagggtttcgtgattctggctgtaataactgtccagttcacagagagcagattccatctgactgcgcagttcagaaagctcttcgttttttttctgttccagactgctacggagctcctgaatctttgtattagtctcctgttccagagcagcgtcaaattctttgcacttttcctccatttctgcagaaagcgcggacttggtgctgtctgcatcctccataatgcgttttgcagtaagttctatttcagatagcttattgagtatctgttccatattcaacctccttttgctgccaggattcttactttgtggaactttctcctatgatacaccttttgttaaaaaaataccatacaaatttacggcattatatggtaattattttatgataagttgtataaaggtcacaaaacaggtatattgttggaaaagaaacacagcagaaattcagaaaatcctgtattaagagaagacagagaagctgttataatgatacaggtaaaattacaggcagacaaggcagtgaaaatgcaggaaatctttttgttgctgagtacagagaaaacatgtatgataggagagaatctttgaatttttgtgaaaagatttattttcgtatattacagatgtcattgtgtaagactcagtatttgtttagttacagatccaggcagcaaaatggattcttccttactggctgtaagggatattaaccataaatatattgtggcagaagctgatataaaataaagtatttttagaggagacattttctgacacgaagagtcttcgttgttttgtttttgcaggatacacatacagagttgaaacatatttttatgtccgcatattgcgaattctattatgcgaaattctgtatttgctcatttatagaataagattaagaaggcaggataaaaggaggaactatattatgagacttagaaatataccgggagccaaagatgcaattctggagaacagatatgtagtccaggaaccaaaaacacaaaaaggaaagtggaatcagtgttttttgaaggaacagcctgttcatatcgaggttggaatgggaaaaggccggtttttgatggacatggcaagacttcacccggacattaattatgtaggaattgaaatgtatgacagcgtgcttctccgggctctgcagaaaagagaagaactggaggaagcgggagaaaagctggacaaccttctttttatgagagtggatgcccgtgagcttcctgatatttttgaaaaaggagaagtgcagaagatatatctgaatttttcagatccatggccaaaggcaagacacgcgaagcgcaggcttacatccagagagtttcttgcccgctatgagaaaatcctgattcctgaaggtgtggtagaatttaaaacagacaacagagagctgtttgagttttctctggaagaggtaaaagaaaaagactgggagcttctggtgtatactttcgacctgcatcatcaggaggatatgatggaaggtaatgtaatgacagaatatgaagaaaagttttcttctatgggcaatcctatctgtaagcttattatgcgtcagaaacagtaagccggcagagtttacggaggacgccgtatgttccggtttataacaatacacatataatatagaagaaatgcagatacttattatttgcaaaaaaaacagagcaaaatgttcaggcagatctgacgcctgaacatagctctgatataaaatccggaaatatggaaaaggaagtgtttttatggctgctgtgagaaaacgcagcaaaatgcagagcattataactcagttcagttatgaacaccggaggctggataaacagctgtcgaagatcaggaaaaacacaggcgaactggctcatatgctggattctctgggagataaaaaaggaacagaaaagaaaaactgaattttataaaaaaaatgtaaaaaagttcttgacttttgatgaagtgtttcgtataataattcttgcgttaaggaaatacacaaaataaacacatttcaataagcgtctttagctcagttggtagagcacctgactcttaatcagggtgtccagggttcgaacccctgaagacgcacttaaagcactgtttttgcggacaacgtgattgccgcggggacggtgtttttcgttgtatagaaattattaaaaatagtctgatattcaaaataaattttatttttttcttacaaagtatcaaaattctgcatctattttttactaatctttttaaaacccatgatagaacaaaatattttcttccggcataatggaaaaggtttaaaacagcgcggcataaagctgcagaggaggaaatgtaatgtcggaaattgcattgagaaatgtaagcaggcaatttgatccagagcattacggagtaaaagactttaatctggatattcatgataaggaatttgtcatatttgtgggaccttccggatgcgggaaatcaactacactcagattgatcgcaggtcttgaagagattacagatggtgaactctggattgatggacagctttgtaattatctggaaccaaaagagcggggaatggctatggtatttcagaattatgctctttatcccaatatgactgtctatggaaatctggcgtatgctctgaaaataagaaaggttccaaaaaaggaaattcaggagagggttcatcaggtggcaaaaattctggagatcgagtctcttttggaccgtcggccctcagctctttctggaggacagaagcagagagttgccataggcagtgcgatcattcgtaaaccgaaggcctttttgatggatgaaccattatcgaatctggacgcaaaactgagagcgcagatgcgggtggagcttctgaagcttcatgaacagcttggaacgacgatgatctatgtaacccatgaccagacggaagcaatgactctggggacgaagatcgtggttatgaaagccggatatatacagcaggtaggtgctccggcaaaaatctataacaatccgatcaatctgtttgttgcaggctttcttggttcgccgtctatgaatttttttaagtgcaggatcaaggcggaggcagacaatcgtgtggctcttgtaatggaagaatccggtcagggaaaaaagttttatttaagtgatccgttgacgaaacgtatgggaataactgcaaacggccgtcaggtaatcctgggaatccgtccagaggatatttatgatgaaaacggcgcaagagagctgggaattatggaccagacagaaaatatggaagaaatagtcgtaaatcgggaaatgaccggtgcagaaaccatactttactttgatgagcagaataaaacgcatgcagtacgtctgaaaccggaaaataagacacagacaggtgagaaaataaaactttatttcgacatggaaaaaatacatatttttgatccggaaacagaaaaaaatcttttatacagggaggaggtgcaataatgggaaaaaaatcagcggcaaaaatcaacccatatttttatcttgtcccaagtatgttgattttcgcagtatttttgttttatccattttttaagactatttaccttagtctgtataaaacaaataaaatgggtgaggcaaagctttttgtgggcctggaaaactataaagctcttcttagttccccgtctttccataacagcctgaaggttaccctgatatttgtttcagtggttgtgattggaagcatgcttttggggcttgtggcagcagttctctgcaataaggcttttccgggaatcaggtttttcagcacagcgtatgcgcttcctatggcgatcgcctccagttctgcggcaatgatctttcagatcatgctccatcctgcagtgggaattgtaaataaactgttgaatcttgatattaactggctgaatgatcccaaaactgcactttggtgtgtagcaatccttacagcgtggctgaacagcggaattaactttctgtatttttccgcaggactgggaaatattgacgaaacaatttacgagagagcgtcagtggatggcgcaagtggcatacagcagtttttcagccttacgctgcccggactttctcctattatgttctatacactggtagtcaatattattcaggcatttcagtcctttggacagattaagatcctgacagagggcggaccaaatgaaagcaccaatgtaatcgtctattctatttacagagatgcgttttttaactatcgtttcggaagtgcagcagcccagtcagtcatcctgtttctgattgttatggtcattacactgattatgtttcgtatggaaaagaaaggggtaaaatactgatgagtcaggcagaaaatatggctttgcccatagagggacagatttccagaagtgagcttctggagataaagaacacaatgaataccagggctcttgcaaaaagaagagggcgtacagcccttcggctgacagcgaatgttctgtttgcttttgttgtgctgcttccattgctttatgcagtaagcattgcatttatgccgtccagcgaactttttacaacagaattgaatattcttccaaagcatcctacatggagtaatttcatcaatgcatttaaaaatgtaccgcttctgaaatttattatgaactcctttattatggcaggatgtattactatcggacagattatttcctgctcgcttgcggctttttctttctctttcctggaattcaaaggaaaaggaattctttttatgctggttatggcaaccatgatggttcccggggaggctacgattatttccaattacctgactgtaggaaaaatgggaattcttgatacttatccggtactgatccttccgtatctgacatctgcaatgggaatctttctgttccggcagttttatatgacgtttccggtttctctttatgaatcggcaaagctggatggatgtggcaatctgcgctttatcgtaaaaatcctgattccactgacaaaatctgctattggagctatggcggtctatacctttatcaatgcatggaatatgtatatgtggccgcttctggtaacaggatccaatgaaagacgtacggttcagattggtatcagcatgctggacagcgtggattctcagtcgatcactctgatgatcgcaggcgtggtaatgatcattatcccgtcaatttctattttcatcatcggccagaaacagctgatccggggaatgttctccggagctgtgaaaggataaataaaaatcacacgaagaagaggagaaaaatcatgaagaaaaaagtaattgcgtcaatgctggcattatccatgatcgcaggaacttcatcagctgtatttgcagcagaaaatacgacagcagagatggcggatgcctcagatgtagatggaacaacaatttccttctggcattccatgggaggagttaatggagaagctctggatactcttgtaaaacagtttaatgaggaaaatgaatatggaattactgtagacgcgcagtatcagggagagtatgatgattctctcaataagctgaaaagcgctcagattggaaatatgggagctgatctggttcaggtttatgagattggtacaagattcatgatcgattccggatggatcgtgcctatgcaggagatgatcgacggagacggctatgatctttcacagatcgagccaaaccttgctgcatattatactattgataatgaattatattctatgccgtttaattcatcgactccaattctctattataataaagacatgtttgaaaaagcaggaattacagaggttccggacagcctggaaggaatcggtgagattggtcagcagcttctggacaatggcggagcaggagaggctatgtccatgggaatttatggatggttttttgagcagctgatcagtaaacagggactggagtatgccaataacggaaatgggcgtaaagaagctgcaacagcagttgcctttgatgaaaacggagctgcaaaaaatattcttacagtatggaaagatctgaatgacaaaggttttgctccgattgtaggaaaaggaggagacgcaggtcttgcagacttttcagcaggaaaatctgctattactcttggatctactgcatctttaaaacagattctgcaggatgttaacggtaaattcgaggttggtactgcttatttcccgaaagtatcctcttctgatgagggtggtgtatctattggaggcgcttctctgtgggctcttgataaccaggatccgaaaaagcttcgtgcaacgtgggaatttatcaagttcctgatctctcctgaatcacaggcttactggaatgcacagactggatattttccggtaacagttgcagctcaggaagaagagacctttaaacagaatgtagcggaatatccgcagttccagactgctattgatcagcttcatgattctgcaccggaatatgcaggagcacttttaagtgtatttccggaagccagagcaatcgtggaatcagaaattgaaagtcttcttaatggaaatgaggatgtggacgctgcagtgaaaaacatgacagaatctattaatggagcaattgaagaatataatcttgtaaatgaataaaaacaatgatgcagtatagctttattccaaaatccgggtgtggtaaaatacacccggatagatttttatggaggacagaaaagtgaaaactacggaaatttttgcccacagaggcgcaagcggctatgagtcagaaaataccctggaggcttttgcactggcagtagaacagggggcagatggaattgaactggatgtccagctcagcagggatggccagatggtaatcatccatgacgaaaatgttgacagagtctgtaatggtacaggctgggtaaaagattatacactggaagaactgaaaagatttcaggtcagtactcctgaggggaaaaagggaaggattcctaccttgagagaggttttggagctggtaaaaccaagcggtattaaggtaaatatcgaactgaagacagggattttctggtatccggagctggaacgtatggtaatagaagaggtaaagcatcagggaatggaggacaggatcatttattcttcctttaaccattatagtatgcagaagatcagagaattagagccagatgcggaaactgcttatctgtacagcgacgtgattcttaatgtggcagattatgcaaaaaagaccgggatcaaaggtctgcatccggcgatctaccatatggcaatggcagattttctcagagaatataaggaaagtggattgaaaatccgtgtgtggactgtgaatgaaacagagcatatggagaagctgttccacgcaggcgtggatgcaattattactaactatccagatcgggcagtgaagatcagagatgaatttctgaaacaacagagataattttaactgaaaaaagataatattgctgatatattaaaatacccatgaaagtgattgatctggtaagccataatggattattaataaaaacatttgatgatacaggaggaaaaaatgagaaggatcagaattattaagaaaaacgatgagtacagccaggagtatgaagtgggagatgtttttgagacagaaggaacctggtacgggggagttcatatttccgggagaaccggagttccggtatctctggataaagaggagtatacagaacttggatcagaaccggaggcgcctgcaataacagagaaagcagctgaaagagacatccgcccgggagatattgtccggcattttaaaagagaatgggtaaatgaaaatacctcagagtatctttataaagtacttgcttttgcggatcatacagaaacgggagaaaaatttgtagtctatcaggcattgtatgcaccttttaaaacctgcgcaagaccttttgaaatgtttatgagcgaggtggacagggacaagtatccggatgtgaagcagaagtggagatttgaaaaagtggaggggaatttctaaaaacaaatcctggcggtattcaaaatatgccgttaggattttttgtatataagatgtggtagaatagggctatcaggtaaataggtgaaaaatattttaagtaaaaacagtataatggagcttcctgtataataaaaaatgtggatgttgaaaattgaaaatacctcagagtacaataagactactgactggcaggttagtaaaaatcttattgaacagagaggtatctacaatgaagtctaacacacagaataaaaaaatagaagcaataactgaaaaaactttggtaatcggaatcgatgtaggaagtgaaacacattatgcaagggcgtttgactacagaggcattgagtattcaaagaaaccatttaagtttagtaacacagaggccggatttgtgacatttaaggaatggatcctggacctcaaagaaaaacatgagaaggataaggtggttccaggcatggaaccgacagggcactactggtttaatcttggaaagtatcttcaggataatgaaatgaaaccagtacttgtgaatccacatcatgtcaagaaatcaaaagaactcgacgacaataatccaactaagaatgatcgtaaggatccgaaagtgattgcaggtctggttagagagggacgatacatgatcccatatctgccggatggtgtttatgctgatctcagaacagcatcaaacataagattccagttacagtcggaacttacaagaatccaaaacaggatcagtcgttggttcaatatatattttcctgaatataagacggtatacggaaagccggatgccaagagcggaatgctgatccttaaggaggcaccactcccggaagatatcctgacgttgggtatcgatggagtggaccagatctggcgggatgcaaagatgagagcagttggaaaggcgagggcgaagaccctgatcgaagctgcggagcacagcgtcggaagcaaagaaggagcagtatctgcaagaatggagatccggatgcttcttgaggactatgaatccagaaatatgcgtctacaggaagttatggttctaattgaagaactggtaaaacagattccgatggctgaaaagctgctggaaatcaaaggtgtgggaatcaagacagtgtccggattccttgcagaagtaggtgatatcagtcgcttcaacagtccgaaagaactgcagaagcttgcaggattggcattggttgagaacagttccggaaagcacaagggagagacaacaataagcagacgaggtcgaaagagactcagatacctgctctttgaggttgcaatgtcgcttgtagcgaagaacccggagttcagggaactacataattattacacaaccagaaggctgaatccattgaagaaaatgcagtcacttatggcgattgcagccaagctgatacgagtcttttttgcgatgctgactaaaggtgtggattatgatccgaaaaaaatggtcagtgacatcaagagaccggcagtttatctacaggctgcataagaaagacaagtaactataatggaggctgtcacgtggacagccactgaattaagcagaatgtaacagataacgtccactgatcacagtgctggaacaggaagcgagtcagtaatcaataatacaaagaatgagccagtagtcggcaggaatattttccatagggcatgaccctgtaatggagcatagctgacaccctggttatgggcaggcaggacgaaggaagttaggacctctggagacagagatgatcctggtggatataggaggttagctgccatagagggatgggtatatacaaggccagtaaaacggaaatcaatgacgttttatttcgtataccctctaaccactatttcagtacctgatacatcgaaatgctcatagctgtggcttattcactgagatatgaaaggttgaaaaaccttgaattttcaatagaaaacacttgattatatgaggaggaaaaaatggaatatattggccatttggaaggggaaaggactcagttattgattgaacatctgaaaggaactgcagaattatgtgaaagtttcgcggcaaaatttggaaaggagcaatgggggtattgctgtgggctccttcatgatattggaaaatattcgtcagaatttcaagaaagaatcaggggagaaagtaatgcagaggtagatcattctactgcaggagctcagatttgtatgaagagagacggattatattcgtttataagctactgtattgcaggacatcattcagggattccggactatggaaattatcgagatacgggaagtgtatcaagtctggcaggacgtatgaagaaaaaaatttgtgattacagtgcttacaagaaggaagtacgtattccaaatctggataccatgccagtgggagctgatgaaaacggatgtaacgattttgcattaagtacttttatacgaatgttgtattcctgtttagtggatgcagattttttggatacagaagcttttatgaaaaacggcgagacaggtcgggattctggagaaagtatagaaatacttctggataagctgaagaaatacacagagaaatggttgcataatacagacattaatacagtaaatggaaggcggacagagattcttaaaaattgctacgaaatgggaaaaagagagaaagggctttttcggcttactgtgcctacaggcggtggaaaaacgattgcgtctttggcctttgctttacagcatgcgatgaagcatcatatggacagagtgatttatgtaataccatataccagtattatagagcaaaatgcaaaaatattccgaacgattttgggaacggagaatgttttggaaaaccattgcaatgtagattatgaggcttcggaagaattaaaacccatgcagcttgcagcagagaactgggataagcctgtgattgttacaaccaatgttcagttttttgagtctttgtttgctaataagtcatctaaatgcaggaaaatacataatattgcaaacagtgtgattatttttgacgaggcccagatgcttccaactaattatttgaagccctgtgtggcaatgattgaggaactggtaaggcattatggagtcagtgcggtactctgtacagcaacgcagcctgcattacagtcattttttggacagggtgtgaaagctgaggaattgtgtccaagaatggaggagcagtttaaattttttaaaagaacaactctgaaaaatataggaaagattgaagaggacgagcttgtagaaaaactgtctggcgaacatctggctctttgtattgtaaataccagaaaacgagcgcagatattatacagtcgtctgcagggagaaggagtatatcatttatctacttgtatgtatcctatacacaggaagagaatgttggatgaagtcagggaaaggctggagaataacaaacgctgtattttgatttctacaagtttggtagaagcgggagtagatttagattttcggtcagtatatcgtcagctgacgggtgtagattctattgttcaggcagctggaagatgtaatcgggaaggcaagaatgcggcagaggaaagttttgtttcgatttttcagtttgaggaaagagattatgtgccaggacagcaaaatcaactggatgcagccgaagagctgataaaaaaggatgcagatttttttgccttggaaagtattaatgagtattttcaaaatttatattacctgaaaggaaacagtttagacgagaaaaaaattttggagcaatttgaaaatagaaattataattttgcaaaggtaggaaaagagtttcaattgattgaaaataatacgatgacggtttttgtccatggagacagtgacgcagacaagattatgcagcaaataaaggaacggggatttaccaaagccggaatgcgtaaagctgggcagtattgtgtgaatgtttatgaagagcaattaaaaagtctgtatgatgccggaaaggcacggcttgtatcagaagatatgcctgatttttatgaactaacggatcaggagcaatataatgaggaatttggactgagtctggaagtggaaaagggtgcggcatgttttatttaaaaagataggagaggcattgattataaaagatatactttgaacaaataaagtttggggaataagaagaaaaagcggtacaaatgaaaaaacatttgtaccgcttttggcattagataattagctaagatgttataatttcaatcctcaggtaatcctgtcagcatttagtatagtatatttaagtgataaattcaattatgatttaatataagttgtgttataaaaaagtcagatttttgaaatatattttttgtaatagatatatagtttcttttgtttatatcgtggcgaacatcataaagaaaattgtaccaagtcgttagcgcgacggctagtcctaagtacgtggttctattactttttttcaaagaaatctgttttcctcaaaataaaagtagcagtttttttatatatgttttattgttgaatcaccacaagacaacctaaaacaatacaaaaaaactgctatgcttatgttatcatggatttttaaacttaacaagtacatattttacttttttatccgtccaccgcctgttttgaaatatcctgactctaaatcaatcttatttcatttacaggaggttccttatggacaaatatttatcttctttcagggagatggtctccctgcgcggtcttactgaccacaccattgcttcgtattctacctatatctccgcttatctgcagtacctttccgacaacggccccactgcaccggaagatgcatcatggcagcagatgcgggactttatcttttgggtccagaacacaagaaatctttctgaccgtacgataaatgcctgcatctcacagctgagattttttacactttatgtcctccataagccctgggacccctatcagctccctttcagaaaatttgactcttataccccttttatcccttcacgtgaagaaatgaaaacattcctgttttccatttctgacataaagtttaaggccatactctgccttatgttttcttccgggctgcgggtgggcgaggtacgtcatctgaaatgctctgacattgaacattccagaaaacgtattcatatacgtgcttccaagaaccgctctgaccgttacgtgcctctttctgataacgtctgggaactcatcctccggtactggtattcatttccggctggttcccggccgaaagactggctctttccacagaagaaaaaaccggacagacccatcgaccaccagcgtatccccagctttatccttgcacacgaaaaagaactcggatgggagcaccgttttacctgtcacacattccgccatgcttttgccacctaccattatgaagacggaaccgacctgctcactttgaaagcgctcatgggacaccggtctgtttcttccacggttatatacgtacatctggcatcaaatgctctgatggcttcttccaatccttttgacagaatggcaggtgggttttatgagtgatctcaaaatccagaagatctggcagtgttcttttgactcttttctttcttccgggcaccctgtttctgacatccagaaaaaagtctcccacgctgtcatgcgttgtaaatccggcgctctcggagccaatgcctgccaatgtaccgagtgcggccatacggaattccacaataattcctgccgtaaccggaactgcccaaactgccaggctgtcttaaaagaaatatgggtggataaacgccgggaggaagtcattgatgcaccgtattttcatgtggtcttcaccctgccccatgagttaaacccgcttatttattgtaaccagaagcttctgtacgggctttttcacagatgctgtgccgaaacacttcttgaattatcttacgataagaagtatctcggtgcgacacctggcatcatacaggtgctccatacatggaaccaggagatcggctaccatgtgcatatgcactgtattgtttctggtggcggcctcacatatgacaagaagatacgcaggtcaaaaaacaagtttttcattcctgtcggggtactccgggataaatttaaagggaaatatctttcccagcttgattccatgtaccggaaaggacagatcgttctctcttcttcctgtgaaacactccggaattcctatgagtggaaggagttcaaaaatgatctttacggcaaagactggtgcccttacataaaagaaacttttaacggatttggcaatgcgctcgaataccttggacggtatacccataaaatcgccatctccaacaaccgtatcctttccgtcacggaaaaggaagtcacattctccgccaggggaaaaaagcccggcgagtccaggcgccagatcactctggagcatacagaattcattcggagatacctgctgcatgtgcttccatccggttttcagaagatccgttattatggtttcctgaacaaccggatgaagagaaaaaatctgaaactcatttttactctgcagggacaccagcgttttaaaagacggtttacagagatgtccatgtctgagcttttaaaggctgtgtgggactttgatatttctatctgcccggattgtggacatagttccatgaaacagctgggaaggtgttatgcaccatcctgattatcctgacttcttatattgttttgaaaaagcctgccaacgggaggctttgaaagtatgtcctgcaatgttttacatcacaaaaatcagcgtgttttcagctgatttctcatcatcttcgacgattttggccatctgggaacaatacaatccccatataagaactggctaaaataccgcgactgggtacaatatgaaagaatcacattcagagcagttccgatttattgcagaactgctctttttgtcaactctgaatctgatactttcctaatgaattatatcatttggggaggatttttcttatatgaaaaaaataactatgtaacaataaaattaaaattcaataatatctttctaacaaaatacttgatatatacaaatgaaagtgatatattaaatttataattatcagacttaaagggaattattattacagtttctgtaaaatggaggggtgtatatgattttatatcatgggagtgcagacatagtagaatacccggaagtgcgaaaagcgaaatataacaaggacttttattacgggttctactgtactcagtatttaaaacaggcagaacgctgggcgactcgttatggaaaaaagggatatattaataaatatgaatatatttctaatcctgatcttaattgtctggtttttgaaaaaatgacagaagaatggttggattttattgtcgcatgccgtcagggaatttcgcatcagtatgatattgtagagggacccatggctgatgatacaatttataattatatacagaattttatagatggaaaaatttcacgggaggcattttgggaactggttaaatttaagtatccgacccatcagatcagtttccattcaatatctgctcttgacacgttaaaatttataggaagtgaggctgtttatgggaacaaaaaataacaatagtctgttttttacctgtagtttaattgaatatataggaagaaaggtaaaaagaacccggaaggaggtgacagactatctgggaaaggatgaaataaacagaatttatgattatgcagatgtatttcactgtgagcctattgaaaaagtagcagatgaatttatacaagaaaatgaaatttccaatggaacatttgataatgtaaaagaatgcaagtatgcagtgccggattattggagtgtgggagaggtatatgaaaggctgattgaggattgctactcagatggaaaaatattggacgggatatgggaggtatatcattcctggatagatgctcatatatcggattataatacagatttttattaccagccgagagattatattgcagtatgctatgaggaaggcagggtgatctaatggagaaggaggaattttatggcaaggggagtaaaaattcgggtatggggagattttgctcttttcacaagaccggaaattaaggtggaaagatattcctacgatgtgatgacgccatcagcggcaagaggcattctggaagcaatttactggcatcccggtatgcggtggattattgacaaaatctatgtaaataaacctgttcgttttaccagtgtccgcagaaatgaagtaaagagcaagatatctgccagtaatgtgctgaaggcatacaatggaggagataagccgctttatctgtgcagcaaacaggagattgttcagagagcgtctgcgatactgacagatgtagaatatgtaatagaagcacattttgagatgacgcaaaaggctaatgaatcagataatcccggaaaatttaaggatattattatgagacggctgcgaagaggagaatgttttcatatgccgtactttggatgcagagagtttcccgctcattttgctttatgtgaagaggatgatatagcaactgcctatgatgatgttccggaaaaggatctggggattatgctttatgatatggattatacagaccccggcaatatacagcctgtattttttcgggcagttatgagacatggtgtcctgaatctggcagactgtgaggtgatacgatgattttgcaggcattggctacctattatgaaaagcttgcagaaatgggaaaggcgactcgtcccgggtggtgcacagctaaagtttcctatgcattaaatttaacagagaaaggagaactccagggcatcatttaccggaaaaagaaagaggagcgggggaaaaagacagtagaggttgcagttcccataacagttccggagatgacaacaagatcttcaggagtctcagcaaatttcctttgcgataatgctaaatatatgttgggaattgataaagagaatgacgaaaaaagcagaaaaagagcacaggaatgttttgaagctgcaagagaaaaacatctgtcaattctgaagaatgcacagggtaagatggcgatggcagtaaaaagattttttgaaaattggaatcccgagaaggcttttgaaaatccgattatcagagacagactggaggagcttacagatggaggaaatctgattttctgtatgggtattcaggaagaggcacaaaaagacgaggaaataaagagcatttgggagaaatcttaccttgaagcagagagcggagaccaggggatctgtcttgttacaggaaaaaagggagaaattgccagaatacatagagtgattaaaggagtgcccggcgcccagtccagcggcgcagctctggtatcttttaatgcacatgcttttgagtcctatgaaaaatctcagagctacaatgctcctgtcagcaaggaggcagagtttgcttacacgactgctttgaattttctcctgtctgatagagagtactctatgcagattggagatactatggttgtattttgggctgaaagcggcagagatgaatgcagaaaagtgttctggttgtccgctaatcctccaaaagataatcagaaagagattgcatcattatttgaagatataaaagaacataaatatattaattgtgatgaggaaattttagatccaaaacagaaattttatattttgggaattgcaccaaatgcggccagactttctgtaagatttttttatcaggattctttaggaaatatactaaataatttttctttgcattatcagcggatgaacatggtaaagccttcctgggaacaaagagaatttctgggaatctggtcaatgctgtatgagacggtaaatcagaaatcaaaagataaaacgccggttcctaatatggctgccatggtacttcgatcaattgtatccggtggacaatatcctcaaagtctgtatttagatacactgatgcgaattcgggcagaacagggggaagtaaaagtaaattggggacgagcttcaatcataaaagcatttctgatacaaaattataaatggaaggaaggagaagaatatatggcattaaatgaggaaagtaaagatacggcatatgtattaggacgtttattttttgcactggaggcagtacagatggaggccaatccggatataaaagctacaatcagggatagatatttcaactcagcctgtacagcgcctgcatccgtatttcctgttttattcagactgaaaaacagtcatatgaaaaagattgaaagagataaaggaagctctaaaaaatattacgaatatctttttacagacattacaggtaaattagatgatattgaatttcccgcacagctgacattaaaggaacagggaaaatttattctgggctattatcatcagaaacagaaaaaatatgagaaaagggaggaaaaataaatgggagaggcaattaaaaacagatatgaatttgtggttttgtttgatgtagaaaatggaaatccaaatggagatccggatgcgggcaatatgccgagaatagatccggaaagcggtcttggaattgttacagatgtttgtttgaaaagaaaaatcagaaattatatagaaacagtaaaagaggatgagaaagggtataaaatttatattaaagaagatgttccgctaaaccgaagcgacagggaagcctgcaccagtgtgggagttcaggaaacagatgataaaaaagtgacagaagcgctgaagaagctaaagaaaaatgaaccgggaacagatgagaagctacgggattatatgtgcagtaatttttatgacatcagagcatttggtgcagtcatgactacttttgtaaaagctgctttaaactgtggacaggtaagaggaccggtacagattgggtttgccagaagcatcgacccggttatgagtcaggaggtgacgattaccagagttgctattacaacagaaaaggatgcagaaaataagagcacagaaatggggcgtaagagtattgttccttatggtctgtatcgggtagaagggtatatttccgctaaccttgcacgcagagttacaggtttttctgaagatgatctggaacttttgtgggaggctattattaatatgttcgaacatgatcattcagctgcaagaggaaagatggcggttcgagaattgatagtattcaaacacagtaaagagctgggagattgtccggcatataaactgtttgacgcagtggaagtaacaaagaaggagaatgttttttatccaagaaagtatcaggattatgttgtaaaggtacatgaggaggagattccggattcggtagaagtaaaaaggatgatataatggaatatgtagaagaagattatttgatgatatcaggaatccagcattttaaattttgcagaagacaatgggcattaattcatgtagagcagcaatgggcagaaaatgcacatactgtagtgggtgagttgatgcacagaaaagttcatgatccatatttaacagagaaacgaaaggatgtaataatagccagagctcttcctgtagtttccagggaaatgggagccagtggagagtgtgatgcagtagaattttatcgtgcagaggatggaattaacttacatggacatcgtggtctgttcaaaatatatcctgtcgaatataagaagggaagaccaaagcttacagaggaggatgagcttcagctgacagctcaggctatgtgtctggaagaaatgttttccactgagatacctgagggcgcgcttttttacggagaaacgagaagacgggaaaaaatagaattcacacaggttttgcgaaaagaggtacgggatatgtttctggaaatgcatcagtattatgaccgaaaatatacaccaaaggtaaaatataccaaagcttgtaattcctgttcactaaaagatctttgccttcctcgaattggaaggacagtttcagtgaaagcctatatggatgagcgcctgagggaggaaaatgaatgaagaaattgctgaatacgttatatgtcacttctgaaaacagttatctttctctggatggtgaaaatatagtggtatttgaagacaaaaaagaggttggcaggctccctttacataatttggaaggaattgtttcttttggatacagaggaacaagcccggcgcttatgggagcctgtgctgacagaaatatttctttatgctatgtcactccgcagggaaaatttctggcaagagtgacaggtaagataaaagggaatgtaatactgaggcaacagcaatatgaaagcagcagggataaggaaatcagtctgtctatagcaaagaactgtattacaggaaaaatttataatgctcgttgggtgttggagcgtgcagtacgtgatcatagccttcaaatcaatactgaccaggtaaaaacagcatcggttcatctgaaacaatcactggaacatataagaaacagccaatcaaaggaacagttgagaggatatgagggagaggctgccagtatttattttggagtatttaatgaactgatactacagcagaaaaaggattttgtgttttgtggaagaaataaaagacctcctttagacaatataaatgcgatgttgtcttttgtatatacgcttttaacaaatcagattgcttctgcattggaatgtgtcggtctggatccctatataggttatttacatacagaaaggcccggaagagtgtctttggctttagatttgatagaagaattaagagccccgctggctgatcgctttgttttgtcacttattaataaaaaagtaattacgagaaaaaattttaaaacaaaagaaaatggtgcagtaattatggatgacgaagccagaaagaggctgttgacagaatggcagaacagaaaaaaagaaacaatcacacatccatttttgaaagaaaagattgagtggggaatggttccttatgtacaggcaatgctgcttgcaaggtatctgagaggcgatttagacggatatccggtttttctgtggaaataagaggataaaattatgatggtattgattacttatgatgtaaatacagaaacaccagcaggaaaaaagcgcctaagaaaggtggcaaagcagtgcgtaaattatgggaggcgtgtgcagaattctgtgtttgaatgtattttggacaatgctcagtgtattatgctgaaggctgtattatccgatattattgataaagaatgtgacagcttaagattttattatctgggaaacaaatatcaaactaaaatagagcacatcggcatggaaaaagggatttctgcagatgacattttaattatgtaaactatgtatagtgcgaaatataagtaaacataaaatacccaggagattcgcacatgaaaaaagcagaaaatacaggaaattatattgatataagtttctcaaataaaagaaacaatgtatttttgttactactttacaaaagttactatttaaatttggtgacttttgctgtcgctcccctcgcgggagcgtgggttgaaatcttattagatatattttctcccgccgcataactggtcgctcccctcgcgggagcgtgggttgaaatcacttttgtgaagcactcaatattgttactgtttaccgtcgctcccctcgcgggagcgtgggttgaaattttgatttctggataacgctccgtcaccaatattgtcgctcccctcgcgggagcgtgggttgaaatgtgtatgtggttaaggaggcgaaagaatgagaggtcgctcccctcgcgggagcgtgggttgaaattgatcagacggctgcggatgccaaaaagaccgggagtcgctcccctcgcgggagcgtgggttgaaattctttattcggcacataggcggctcgtataaaaggtcgctcccctcgcgggagcgtgggttgaaataaggtcgtccataccgcaatttccctgtcgcgcaagtcgctcccctcgcgggagcgtgggttgaaattgccatacacgcaaattatctcgttatcgtctagtcgctcccctcgcgggagcgtgggttgaaatatgtcccaactgctctgccggtcttgaatttaacagtagtcgctcccctcgcgggagcgtgggttgaaatagttcaacgcttccaaagccttgaatgaataatgtcgctcccctcgcgggagcgtgggttgaaataccacgatgtaatagaagcaatttactaaacactgtcgctcccctcgcgggagcgtgggttgaaattcccccctgtctataaacaactctagtgcctttggtcgctcccctcgcgggagcgtgggttgaaatcatgtgctaatagttgattgggaaataccagtgtcgtcgctcccctcgcgggagcgtgggttgaaatccatgcacagggcagtaagcggtatgtacttgttggggtcgctcccctcgcgggagcgtgggttgaaataccagcgaggcaaaagcatctgtaaaaaacagaggtcgctcccctcgcgggagcgtgggttgaaatttatgatgacggagccttgacggttaagtatggtcgtcgctcccctcgcgggagcgtgggttgaaatatttaaaatcgtggctgaattaaaattggctacacgtcgctcccctcgcgggagcgtgggttgaaattgctgagtacctgagaaatcgcacctaatagtggtcgctcccctcgcgggagcgtgggttgaaatatattgtcactccttttttgttaaatattttttagtcgctcccctcgcgggagcgtgggttgaaatttttttgataggacaaaattaaaatttgatgatggtcgctcccctcgcgggagcgtgggttgaaatgtcaaattctgtattaaagaaacctgaatacattgtcgctcccctcgcgggagcgtgggttgaaattgcattagtgagttgcaaacccaaattcaacagtgtcgctcccctcgcgggagcgtgggttgaaataatttcactagttgataattttgtccacggatatcgtcgctcccctcgcgggagcgtgggttgaaatttgtaatcctctcgtagttatccatatttgtgtagtcgctcccctcgcgggagcgtgggttgaaatttgatttttatgccgcttcagaaggagcggcaagtgtcgctcccctcgcgggagcgtgggttgaaattgaggaagattgtccgagaggaatccggaacatcgtcgctcccctcgcgggagcgtgggttgaaatagttcaagcaccttgatacacaggatatagagggagtcgctcccctcgcgggagcgtgggttgaaatcaaggaatggagatttttggaaaatccacacaaaacgtcgctcccctcgcgggagcgtgggttgaaattttccacttccggtaccgccgataatgcccaccgtcgtcgctcccctcgcgggagcgtgggttgaaattcagttggaacacctgctgaacgatcaggaagaggtcgctcccctcgcgggagcgtgggttgaaatgcaaagcaaaagcatggctgactggaagcggatggctgtcgctcccctcgcgggagcgtgggttgaaataactattttgaatacaatcaaaaacgttgtgtcaacgtcgctcccctcgcgggagcgtgggttgaaataaacaaatctgtcaacgaaacagtacgccctatggtcgctcccctcgcgggagcgtgggttgaaatcaaggaatggagatttttggaaaatccacacaaaacgtcgctcccctcgcgggagcgtgggttgaaattattatatgttactacactctggtttgtattgcgtcgctcccctcgcgggagcgtgggttgaaataggagatcctgattgcaaggggctttaaaggtagtcgctcccctcgcgggagcgtgggttgaaatttaagaagaaacgcaggaataacagatgccttggtcgctccccctccccgcgggagaaggtgaattgaaaaaggtaaatcttgaattactggtttccagtaacgctttaatgtgatataatagcttgaattattttttaggaggggaaatcagtgaaagaaagagaaacttttggctcacggcttgggttcattctggtgtctgccggatgtgccataggtctgggcaatgtgtggaaattcccatatatgacaggaaaatacggtggagcggcgtttgttcttatttatcttgtttttcttgtagttctgggacttcctattcttgtcagcgagtttgcagtgggacgcgccagcagaaaaagtacggcgaaggcctttcatgaactggaaccggaaggctccaacttccataagtacagctatatgggtatgatcggaaactatgtgctgatgatgttctatactatggtagcaggctggacgctgtattacggttacgtaatggcaaccggaaagcttcagggtgcggattctgcacagataacagaattttttgggaacttccagaaatccacaggaaccatgaccttctggatggtccttgcagtgtttctggcatttggaatctgttctctgggacttcaaaacggagttgagagaattacaaaggtcatgatgctgtgcctgttaggtctgatcgttgtgcttgcagttcattctgctactttggatggagccgtggaaggtattaaattttatctgattccgaattttgaaaacatgaaagaagccgggatcggaaatgtaatattcggagccatgtctcaggcatttttcactctgagcattggaatcggagccatggagatctttggaagctatatgaaaaaagatctgacactggcaggagaaagtctcagtattcttgtgctggatacctttgttgcactgatggcaggcatgatcattattcctgcatgttttgcgtttaacgtggagccgggggcaggtccggggcttgtatttatcacacttccaaatgtatttaaccagatgatgggcggaagactctggggcgcattgttcttcctttttatggcatgtgcggctctgtctacagtggttgctgtatttgaaaatattctgtcttttgccattgatctgtggggatggagccgtaagaaagcggtaatggtaaatattgttcttgttatcattctttctatgccggcaatccttggttttggaccgtggtccggaatacagattttaggtgaaggaacaaacatcatggatctggaagattttattgtatctaataatattctgcctcttggttctgtattgtttgtgcttttctgcgcatcgaaaaggggctggggttggaaaaactttttaaaggaagcaaacacaggaaagggagtaaagttcccggcaggtatccgcatgtacatgctgtgggtaattccggtagtggtttctgtaatttacctgaaaggctactacgacatgtttaagccaaaaggaatggagtaccttgttccgtggatgatcattggtgtggcaatgcttgccctggttgtgtggattgcctttggccatagcaaaagtaaaaaagacaggagctgacggatatgatagcagaaaaaatgattccttttgttcagaataattctgcgatccgtactatgtttgaggaggggaatcgtctgaaaaaacagtacggagcagataaagtatatgatttcagcctgggaaatcccagcgttcccgcgcctgactgtgttcgggaagccattgttgatctggcaaataatgaggatcctgtaattcttcacgggtatatgaataacgcaggatttgaggatgtgcgtgaaaccattgcgcagtccctgaaccgccgttttgggacagatttttctgcgaaaaacctgatcatgacagtgggagctgcaagcggactgaacgtgattctgaaaacagttttgaatcccggtgaggaagtaattgtttttgcaccatattttctggaatatggtgcatatgtaaaaaattatgacggaaagcttgtggaaatctctcctgatacagaaacctttcagccggatctggaggaactggaaagaaaaatcactgcaaacacaagggcagttattgtaaacagtccccataatcctacaggtgttatttattcggaagatacaatcaaggctctggcagccattcttgagaaaaagcagaaggaatatggcagtgtgatatatctgatctctgatgagccttatcgtgagcttgcctatgacggggcagaggttccataccttacaaaatactacaaaaacactgtagtaggctattcttacagcaaatctctgtctcttccaggagaaaggatcggatatctggtgattcccgatgaccttgaggacagtgaaacagtaattgcagccgcaggtattgccaatcgtattctgggaagtgtcaatgcgccttccctgatgcagaaggtgattgcccgctgcgtggacgcagaagtggatgtggcggcctatgataaaaatcgtctggctctctataacgggcttactgcctgtggttttcagtgcatcaaaccgcagggggccttttatctttttgtgaaatcaccggttgctgatgaaaaggaattctgtgaggcaggaaaaaagtataatattcttatggtgccgggaagctcttttgcctgtccgggatatgtgagacttgcctactgcgtttcctatgagacgattatcaattctcttccggaatttaaaaagctggcagcagagttttccctgacagaggaaagctaatgtcggaaggagtagtatactcttttcacagtcagctgtttttatgatgacaaaaaaggaaataataacgtaaaaacgataacaggattctttttccataaaacaggaagagaatcctgtttaaattttatcaatcttttttcggatagtcagcattttctgatccagcgcacggatgacggcagcgcactgctgaagttcctcgtcgataaactgagtttctttttttccacgcttatagcggagctgatgatccagatttgcccagtaatccatggcggcagtgcggagctgaagctctatttttatccattggatatcttcctgaaaggggactgctgtttccaggatcagatgaaggctctggtagccggaggcttttggctcctgtatgtaatccttggttttcagaatgcggatatctttttgctttttgatcatctgggcaacctggtagatatcgtctacataagcgcagacggctcttacaccaatcaggtcgtttattttttcaagggcaacattaaaattcagttcaagcccttttttctgcatttttttatatacgctgtcgtattccttcagccgtccggttttcatctgaatgacattgcgctgatatttcatggtaaggattgtattaataatatcaagctttgccagcataaggctgacggcgcattttccctttgtgcagaatgtttcagatgtcagtgcacgccttaactgctctttctttttcaatttcttctgttcttcctcaatctgtgcataaataaatttccaatggtcttttactgcaatacaactgttcattactttacactccttataataaatagaaaaaaagcctgagttaatttcgggtaaaatatatctgaaagcctgagtgtctgtcagaataactgtttgtggcagatatcagacagaaaaacagtccccatcaactaagatatgcattggtataaaaaaatatgacagaaaatttttgtatatattacacaaaaaaggagagatttaagatttatttttaaatatttttttattgagataaagattgacaaatgattaacaaactaatataataaaaccatcaagattgacaaatatttaacgttaatcaattaacataattatttgccgctctatcaaaagaaagtaacaatcaagaatataaatggattaacaaggaggatttcaaatggcaaagacagaaacccacatcccggctgtgatcgacactgcagaggcactggaagcaaaaatggctgcgatgaaagaagcacagaaacttttcgccacctatacacaggagcaggtagacaaaatcttcaaggctgcggctaccgctgctgacaaagcgcgtattccccttgcaaaaatggctgttgaggaaacaggcatgggcgttgtggaagataaggttattaagaaccactacgcagcagagtatatttacaatgcttataaaaacacgaaaacctgtggcgtgatcgaagacgatccggtttatggaatcaaaaagattgcagagccgattggcctgatcgcagcagttattcctacaacaaatcctacctccacagcgatttttaaaacactgatcgcattaaaaacaagaaacgcaattatcatcagcccgcatcctcgcgcaaaaggctgtactattgctgcagcaaagcttgttcttgaagcagccgtaaaggcaggcgctccggagggcattatcggatggatcgatgttccaagccttgagcttaccaacctggttatgaaggaagcagacattattcttgcgacaggtggtccgggaatggttaaagctgcatattcttccggaaagccggctcttggcgttggcgccggaaatacaccggttatcattgacgatacggcagatgtacgtctggcagtaaactccattatccattcaaaaacctttgacaatggtatgatctgcgcttccgagcagtctgttactgtactggaaagcgtatataaggcagtaaaagaagagtttatttacagaggctgctacttcctgaaaaaggatgagcttgacaaggtaagaaaaacaattattattaacggcgcgctgaatgcgaagatcgtaggtcagaaagcagcaacaatcgcagaaatggccggtgtgactgttccggctgaaacaaagatccttattggcgaggttgagtctgtggacatcagcgaagaatttgctcacgaaaagctttctccggtacttgccatgtataaggcaaaaacctttgacgaggctcttgcaaaggctgaacagctggtagctgacggcggatacggacatacttcttctctttatatcaatgtaaatgagaaggaaaaaatggcaaaacatgcagcagctatgaaaacctgccgtattcttgtaaatacaccatcctcccagggaggaatcggagatctttataactttaagcttgttccatcccttactctgggctgcggctcctggggcggaaactctgtttctgaaaacgttggagtaaagcatctgatcaatattaaaactgttgcagagaggagagagaacatgctctggatgagaaccccggaaaaggtttacttcaaaaaaggctgtatgccggttgcccttgatgagctaggaactgttatgggcaaaaaacgctgctttatcgtaaccgactctttcctttacaaaaacggatatacaaaggcaatcgaggataaactggatcagatgggcattgtccacacctgtttctctgatgtagagccggatccgtctcttgcatctgcaaaagccggagcagcagcaatgcgcgcctttgagccggactgcattatcgctcttggcggtggttctgcaatggatgccggaaaagttatgtgggtgctttatgagaatcctgacgctgattttgacgatatggcaatggatttcatggatatccgcaagagaatctataccttcccgaaaatgggtaaaaaagcttactttgtagcaatcccaacatcttccggtacaggttccgaggtaactccgtttgccattattacagacaaagaaacaggaatcaaatggcctctggcagactatgaactgatgccgaacatggctattgttgatacagacaacatgatgagcgctccgaaaggcctgacctgcgcttccggtattgacgttatgactcacgcgatcgaggcatatgtttccgtaatggcttctgactatacagacagtcttgctctgaaagcaatcaagctggtatttgattatcttccaagagcttacagagacggaaatgatgtggaggcaagagaccatatggcaaacgcttcctgcatggctggtatggcttttgcaaacgctttccttggagtaaatcattctcttgctcataagcttggcgctttccatcatattcctcacggaattgcaaatgctctggttctcacagatgtaatgcgttataatagtgttgaggtaccgacaaaaatgggaacattcccacagtatcagtatccgcacacacttgcacgttatgcagagatcggacgtttcgtaggtcttacaggcaaaaatgatcaggaagtatttgaaaaacttcttgagaagctggaagagctgaagaagatcattgagatcaagccaaccatcaaagattatggcgtagatgagaaatatttcctggatactctggatgagatgactgaacaggcgttcaacgaccagtgtacaggagcgaacccgagatatccgttaatggctgagctgaaggaaatctatctgaaagcatactacggaaaagagtccaaataagaaaagggagggtatttaccatgaagctgaaagacaaaaaggtatttttgacacgtccatataaagttgtctacaaagatggagaccgtattatcaaggtatttaccaaagagcacggaaaggcaaatgtctttaatgaggctctctgccaggctcgcgtagaggaaagcggactggatatcccgaaggttctggaggtaactgagatcgatggcgagtgggccattgtgatcgaatatgcagaaggcaaaactctggaacagctgatgaacgagaatccggataagcttgaggaatacatggagaaatttgtagatcttcagctttccatgcatgagaaaaaagctccgcgtcttacgctccagaaggacaaatttgcccgcaagattgagagcatgaaagataagctggatgctactgttcgctacgagctgctgacaagactggattccatgccaaaccacaccaagctctgccatggggattttaacccaagcaacgtgatcgttgcagaggacggaactatgaagatcgtagactggtcccatgcaactcagggaaatgccagcggcgatgcagccattacttatctggaatttgccctgaaggatgaaaaaatggctgacctgtacttgaagcttttctgcaagaagagcgataccgcaaagcagtatgtacagaaatggcttccgattgcggcggcagcccagcttaccaaagatgtaaaagaggaagaagagttcctgcttcgctggacagacatcattgatttccagtaaaatttatagaaaaaccatttgaaacaaatccctttattatttataaaatccccgggctgactgtgtcggtttcggggattttggacttccgcagtccggcattggcacattcttggaactgtggtagaatagaaataataaagtgacaaattaaaaattgcagtacatggataaaatacaagtgttatttaacagtcttacgcaggagtattttggatagacagggggggatttgatggcaaaaatgacagtataccatggtgggtttatgccggtagagcatccggaaatccgtatcgggaggaatacgaaagattttggaacaggattttattgtacaattataaaagagcaggcacaacggtgggcgaaacgatatgatactaaagttgtgtctatatatgaggtacgtttgaattcaaatttacggataaaagacttcaaagatatgacggatgaatggttggattttataattgactgcaggagtggaaaacctcatgattatgatattgtaatcggggcaatggcaaatgatcagatttataattatgtatccgattatatggaaggggctattaccagagaacaattctggatattggcaaaatttaaatatccaacacatcagattaatttttgtacaaatgaggcactgaaatgtctggaatatagaggggctgaggaggtgttgtaatgacggaaaataatggaagagaagcggcaaaagataacgatttattttttacctgcagcctgattgattatattgccagaaaaactcaaaatacgcgggcagatgtcgtaaatatgttaggggcagaaaaagttgaaaaaatttacgatttagcagacatataccatagtgataatatagaacgtgtcagtgatgattttatacgggaagcaggtattagaaacggtgaatttgataatgtaaaagagtgtaattatgcaattccatcacattgggatattggaaaagtgtataaaagattgataaaagctgtagctgagcacgaaaaaatcggaattattgaagcattgtttaaggtatacaattcatttctaagtactaagattgatgattataacagcagtatgtattacgagaatccagcttatttactggagtgttacctggaaagtagagttatttaagaaaaatgcaaaaatattagatactggataccaggtttcgaaagaaattgcatttgcaaaagtaaagtaaaggaaattattttcccttcggtgtataaagaaaattaacattccgtttttatccataatatttgttatatacataagatatattcagaatataaaataatacataggttatcgggaaataaatgaatatgagagactggtaacctgtgacgaacgtttcatgggctataaagaattcatgctgtatgcaatcggaagaaacataagaatctcctatggaagatcaggtataaaaacactgattcctacaggagatttttattttaagatttagaggctaaaaaacggtatttacagacaggctcattttttatgaaaaataaaaagaaaatgcaacacaacatgaaaaaatacgtctaatataatatacgggagtaaatgaacaggaggcgtgtatggaagatacggatatcattgagttatttttaaacagatctgaagaagcaattcgtcagactgacataaagtattcaaagctctgttttggaatcgcatggaatattttattgaataaagaggattcagaggaatgtgtaaacgatacctggttaataacgtggaatgagattccacctaaaatcccgaaaatcctatctgcatttctggggaagataactcgaaatcaggcaatcgactgtttacggagaaaaaatgcgtttaaaagaccagactctcatatggcagatatcaatggtgaattggaaagacttgaagaaacggtacagtattctctggaacataatataaaacgtcaggagatcttagatgttctggatgaatttttaaaaggattaaaagaagaagacagggatatttttgtgcggcgttattggtatatggatgatattaaagaaatttccaaaagacattctgtttcggaaagcaaggtgaaatcaagtctgtttcgcagcagaaaaaaattatggaaaaaggcaggagatcttttatgaagaacaattatacctttctggaattatttggggatattgatgaaaaatttatttatgaggcttctcgtccatggaaaaaacggataatcgtaaaatacaaattattaaaaattgctgtagcgggatttatattactatttttagcaacaggtatcattacacataaggaagaggtaaaagcagcatggaaacagtttgcttcatggatcggaacagcactgggtctttctgaggatgtcagcagttatacagatattatagggcaaacaataaccagaaaaggagtttcggttaccattcatgaagtggcagcagacaaaaatgatctatgggtggctttttctgttacttctgattcagaaaaaacagaagaaccagttttgctgacagacgtgcttattaataaacaggaaatacaattgagcgaaagctatcccgtgcttttagaaaatggggagatgcagggagaggtttctcattatacgatagaagacaatatttttgccaatgaggaagcagatgtaacaataagtgtgcatacagcttcgccggaggagatacaaaaaatagatgaaagttcaaagtcagacgagtatgtttttgaatttaaaacagatttaaaagaattggaggcaaatactgaaataattaatatagatcaacagattaaaataaatgaaaatcagaatcttacggtttctcaaatgcggctaaatgattttacaagtacgatttcaggaaagatgacagatttgggagagtatgatgaatattatttgataggagaagacaatctgggcaattctgtttgttaccggcttgcagattataataaaccagaaatactgtttcaacaggacagagttttcgaaagatatacaggcatttctccaaatgcaggatctgtaacccttcagttatatgttgataaatataaaaataaagatattgaaaacaaatatttttatacaacaggagaagaggacacatatggagaaggaacaggaagtgtgtatgagggagatgcggatttaacacagatatattgtccattgggtaataaaatagaaataaaaattcgataacaggacaataaatcagccgcccactactcgcaatagtgaacggctgtgtaaaacagttatcataattaattgagggtaggccgtgtgtttctggctttccctttttctattatcaatagaacgcatctgttagaataacacaagagctttatccctctgtcaaaatttcattttaggttctttgcctttgacttttatatgatagatcagtttttcttaaatcctgcgcgttttctttctcttgggtcaagaattctcttacggatgcgaaggcttgtaggagttatctccagaagctcatcctggtcgataaattcaatggcctgctcaaggcttaatactttaggcggtgtcagtttcagagcctcgtcagcggaggaggaacgggtgttggtcagatgcttggtcttgcatacgttcagctcgatatcttcagcctttccgttctggccgatgaccatgccgctgtaaacctttgctcccggtccgatgaagagtacgcctcgttcctgagcggagaaaagtccgtaggtaactgcttcgcctgcttcaaatgcgatcagggagccctgtttgcggtactggaagtctcccttgtacggggaatagccgtcgaacatggtattcaggattccggttccttttgtggaagtcataaattcgctgcggaaaccgatcagtccccgggaaggaatgtggaactccagacggacagagccgtcgctggcagtgctcatcccctgaagctcgcctttacgctcgctcagcttctggatcacagtaccggaaaattcatccggaacgtccacatatgcgatttccattggctccatctttttgccgcgctcatcaaaatgataaaggacttcaggcttgctgactgcgaattcatagccttcgcggcgcatgttttcgatcaggacagaaagatgaagctcaccgcgtccggaaaccttaaagcactcagttgactcggtatcctccacacgaaggcttacgtcagtgttcagctctctgtaaagacggtcgcggagatgacgggaagtaatatattttccttcctggcctgcaagcgggctgtcgtttaccaggaaattcatggaaatcgtaggctcggaaattttctggaaaggaatggcctccggattttcaccgccgcacagggtatcgccgatatggatgtctgcaataccggaaacagctacaatggaaccgatagaagcctctttgacttcaatcttatttaatccgtcaaattcatagagcttgctgatctttactttctgacgtttatccagatcatgatgattcaggagggtaagctcctggttcacggcaattctgccgttttctactttaccgacaccaattcgtcccacatattcattgtagtcgatggtgctgatcagaacctgtgtatctgcatccgggtcgccttccggagcaggaatgtatttaagaatagtttcaaagagaggagccatattttccggtgtatcggaaagatcaagaactgcatgtcctgcctttgcggatgcatacaggaacggacagtcaagctgctcgtcagaagcctccagatccatgagaagctcaagaacttcatcaattacttcgtcagggcgggcctcgggacggtcgatcttattaatgcagacaattacgtgaaggttaagctccagagcttttttaagaacgaattttgtctgaggcatagcgccttcaaaggcatctacaagaagaattacgccgtctaccattttcagtacacgctctacctctccgccgaaatcagcgtgtccgggagtgtcgatgatattgatttttacgcctttataatggacagcagtgtttttggacaaaatagtgataccacgttcacgttcgatatcattggagtccatgacacgttcctgtacttcctgattttcacggaaaacaccgctttgtttcagaagctgatccaccagagtggttttgccatggtctacatgggcgataatggcaacattgcgtacatcttcgcgtttggtcttcataaaatttgaaatcctttcttttttcttctatattaatgtgttttttattcatggtacgacatttcagtttaccacatttttcgcagattacaaggcattcaaaaaaattttttaagattttggttctaaacttccgggcaggtacataggctaatatagacaaaatacccaaagaggaaggagaactatattatggcagacaaaattattgaaaacaatcaggtatcaatcatggggaaaattgatacgggctttactttcagtcatcaggtatttggagagggcttttatgtgatggatctgatcgtaaagagactcagtgattcagaggacaggattcctgtcatggtatccgaaagacttctggatgtaacgcaggattacgtgggagagtatatagaaatccacggtcagttccggtcctataaccgccacgaggaaaaacacaaccgtctggtactttctgtttttgcaagggaggtaagatttgtagaggaagaggacgactcagttcccgtaaatcagatctttctggacggatatatctgtaaaccgccggtttaccgcaaaactccgctgggaagagaaattgcggatcttctgatggctgtaaaccgtccttatggaaaatctgattacataccctgtatctgctggggaagaaacgcccggtatgcctctgcttttgctgttgggggacatgttctgatctggggccgtatccagagccgggaatatgtaaaaaaactgggtgagaaccaggcagaaaaaagaatcgcctatgaagtttcagtaagcaagctggaatacatggagtagagcccgaaacatgcattgcctcattcaggcggctgtattatttctgcacataagcagatgaatggggcaaatatatgggcggcgcctggtatcgagtggttctgtgggaatagaaaatacaagaatatatgcctggctgaacaaaacccctgacggattcatacaccggcaggggcttgtttcatctgttattcagctggaaattcaggcctgccttacaacagtctttttaaagctgcggaaaacgcctgtctgttcgagcagtctggtaatcgtgaaaaagataaaggagtcaattggccacatgatcagattttttactgcgcgtgcaggcagaattgcaaggaaacctttgccgtacagcatgtcaagccacagagtgttcagaactacattgacaacaagaaccactaccagcttggcgatcagaactcttttcagagtcagcttctgacggtaataaaagcatccgtaaataaaggctgcgagcattgcgttaaacgtaaagccaaagaaaaaggctccgtcaggtttcatgaaatattttacaagatccagaattcctgcaaataagcctccggtaatgggaccaaacagatagtcaacaatctggtttggaataccggaaaatccgattttgatatacggacccagattaatggatgccactgaattcaggatcagtgcaagtgccgcaaacattgcgcacatggcaagagcaggcacactcttcagctctttggctgaagaaagaaacatgtttttgtttttttccataaaaaaattacctcccttcgcagatatctgaccacaataggagataaccaaaaatatttaccctctgttgcagcgagatgcaacccatataccgcaagatttctcttttcgtccttccggcaactctctatccggatggcactttacgcatatgaatttactctgcatgtcttttatgggtttattatatactattttattacggcacgcaataaaaacagagcatttttcgacattttagtataggcagattattttcaccgattagaaggcttctgaatactgacagaggacggaaaagcttgcaatttcaggcgaactgaggtaagataaggacattgaaaaagatgcagtttcatcaatattaagaggaattgtcatgaaaaaagaattaacagaagtatactgcggaagcgcgaagggaaagacgacactggctctggggcacagtcttcgtgcggctgctgagggaaagagcgttattatcattcagtttctgaagggaaaagaaacacgttctgttgattttctggagcagttggatgatctggatattaagattttccgttttgaaaaaagagactgctgctatgatgatctgagtgatgaggaaaaggcagaagaacgttctaatatcttaaatggattgaattttgccagaaaagttgttgtgacccaggaatgtgatttccttttgctggatgaaatccttggtgtcatggaacagggaattgtttctgtggaaacagttgcagacattctcaggcagaaagacgaaagtatgcagattgttatgaccggttcgaatctgccggaaggattgagaccctatgtggacacagtgataaggctcactgaggatatggtcggaaatgattcagagcaacagtaaaatccgtgattcgggtaaaatccgtgattcgggaagactgtgatttgcataatatagtacagaagaataaaaggaggaacttatatggcaatttttaagggcgcaggcgttgctattatcaccccgatgcatgaagacgggagtgtaaattatgaaaaactggaggaaattctggagtttcagattgctaacagtacggatgctgtcattatctgtggaacaaccggcgaatcatctacaatgactcacggagaacatctgaaaactatcaaatttgcagtggataaggtggcaaaacgtgttcctgtgattgcaggtacaggctccaactgtacagaaactgcaattatgatgtcaaaggaggctgcttcctatggtgtggatgcgcttctggttgtaactccttattataataaagctacacagaaaggtctgatcgctcattatacagcgattgccaatgccgttccggaaacaccgatcattatgtacaatgtgccaagtcgcaccggctgtaaccttcagccggctaccgtagccgcacttgtaaaaaatgtaaaaaatattgttggaatcaaggctgccagcggagatctttctcagattgcaaaaatgatgtctatggcgggagaggatctggagctttattccggaaatgacgaccagattcttccgattatgtctctgggcggacttggagttatttctgttctgtcaaatgttgctccgaagcagacacatgatattgttatgaaattcatggaaggagataccagagaggcggcaagacttcagcttgaagcaattccgctgatcaatgcacttttctgtgaggtaaatccgattccggttaaaacagccatgaacatgatgggtatggaagtaggtcctcttcgtatgcctctctgcgaaatggaggagagcaacaaagaaactcttgcaaaagcaatgaaggattatggtcttaaacttgcataaacaagaagccggatcaaattcagatgcctgccagtttacaggcaataaagcagatatgattttacacatatctggatgtgtgcatacaggcacacagaggaggtaattatgataaaaattatgatgcacggatgctgtggccatatgggccaggtaatctcagaacttgtggaaaaggatccggaggcggagatcactgtgggagtggatattgcggataaaggtaatacttcttatccggtgtatacagatctttctgcctgtcaggaagacgtggatgtagtgattgatttttcttctgcaaaagcagttgatgcgcttcttgattattgcggagaaaggaagcttcctctggttctgtgcacaacagggctcagtgaagagcagctggccagggtagaagaaacagcaaagaaaacagcagtgctgaaatcagcaaatatgtctcttggaatcaatacccttctgaaactgatccaggaggcggccagggttctggcaacagccggatttgatatggagattgtagaacgccatcaccgtctgaagctggatgccccaagcggaactgctcttgcgctggcagacagtctcaatgaagctatgggcaatgaatataaatatgtttatgaccgcagccagaagagagaaatgcgctctgataaagaaattggtatctctgctgttcggggaggaacaatcgtaggagagcatgaggtgatctttgcaggtccggatgaagtgattgaatttaagcataccgcatattcaaaagctgtatttggaaaaggcgctgttgaggcagctaaattcctggcaggaaagccggcaggccgttatgatatggccgatgtgatcgagggttaataatcagggcaggacaagtgctgaaaagcagtagtcctgccttttttggaatttttttcacgaataaaactgaaaaaattacgcatattacctgtatgagctttaaaattccaagaaaaggagacaatcaggatgaaaaacatcaaaaagatcattacaggtatgatgcttgtactggcattaactgcatttaccgcctgtggagaaagaacagacaataatgcagacgaaacaaacacagcaaaagataacgtgatggacaacggagacagagacaacaacatggataataaggatgcagttccggatgctgacaggacagatgataataggacagataacaatgggacttctgcggatacagatacaaagaatgacaatactgcatctgaaaataacgctgctgatgacaacactgttgcaggagacagaacagatgatgttgcggacggcaccatggatcagagtactgacagaaatgatgataccgtttccggtgagctgggaaacagtgtaaaagatctcggcgagggcgtgggcaacgcagtagaagatgtaggtgacgcagtgggaaatgcggcagagggaaggtagctttttatttactggtaaaacagtacgttctgtacaggccattccggtgaataagaaacacttccacaggatgcggccagatgcctgcggaatatgacggcttacggcagtctgcacctggtctgcagctgctgccatacagagacatgccgatacgggacagtatctgtaggagcatgtccttacatagaaacatattacgtgctgcaatatattctgtaaaagacaggaagtacaggatatgtgcagggataaaggaggatgaatcagtgaaattccgtccgtgtattgacatacataatggtaaggtgaaacagattgttgggggaagtctgagagacacaggcgatcaggcaagagagaattttgtgtcagagcaggatgctgctttttatgcggcgctgtacagagattccggattacagggaggccatgtgatccttctcaatccggaagattcaccctattttcaggaaacaaaaaaacaggcgctgaacgctttaaaaacctatccgggaggccttcagatcggcggaggggtctgcccggaaaatgcagaggattatcttgatgcaggcgcaagtcatgtgattgttacctcctatgttttccgaaatggaaggctgtcctgggaaaacctggaaaaaatagaaaaagaaacaggaaaagagcatctggtacttgatctcagctgtcggaaaaagaacggagcttactacatcgtaacggacagatggcagaaatttacagatgtaaagataactttggatacattgagggagcttggcgcccactgcgatgaatttctgattcatggcgtagatgtagaaggaaaagccggaggaattgaggcagaactggtaaagctgcttgcagagtatggagaacggtcagtaacttatgcgggcggtgtgggaagtatggaggacattcgtactcttgaaatttatggaaaaggaaaactggatgtaacggtaggaagcgctctggatctttttggcggaaagataccgtttgacagtctgaaaaagcttaaataggaaccagagtcaaagcatggaggaattatgtcaacaataacaaagagagctcttgcagaagctctgaaaaaaatgatggaaaagaagcctctttccaaaatcactgtgacagaccttgcagaagcctgtgggattaacagacacactttttattatcatttcagggatatttatgatctggtggagtggatttattgcagtgaggtggaaagagccattatgggagacgatcttgctgacagctgggaagaacgttttcggaggttttttacctatgcccgggaaaataaaaaatttatcatgagtacttacgcatctgttcagaaagattatcttctgaggtttatgtatacatatattgttaaaattatcagtaatattttggatgagatggcagagggaataacggttgctcccgaaaaacgaaaatttattacagatttttatacctatgcctttgaaggaattattttttcatgggtaagagacggaatggagcaggatcccgaggaattgataaaaatgctgggagctataatcacaagagggaatgaggaaaattctcttcttcgtattctggaaacctgaatttaataaagatacagagctttttagccagatagaggacagtggtaaaaaactaaacactgtcctgtttttgtttatggaaaaaataacacaggagaatataatgtgtttatgaacataagaaaagatatgattgaccatgcgcagcaggcgctgtaaggaggagttttcagatgaacagggtaacacacgcagcaggaagaaaggtattttccagaatcgtagatcatgagcttagccagatcagtaagaaccgggaacaggcctatgaaaaaatccttgatactgcacagaagtatatggatgaatttgatctggggatcaactgggaatatctgaggagagtaactttaaaccagggatataccctgaatacatatattaattccatggctgatcagctgcatcccaatgtgctgaagacaactcttctgaatctgggatatgaagcgttttataatggaaccaggacaatccgcgaaatgagaaagatccataactgcaacattccctggattatcttaatggatcctacaagtgcctgtaacctgcactgtaccggatgctgggcagcggagtatggaaataaactgaatctgacctttgacgaaatggattctgtgatcacgcagggaaaagaactggggatttatttttatatgcttacaggcggagagcctcttgtacgtaaaaaagacgtgattgctctctgcaaaaagcataatgactgtatttttctggcatataccaatggtactcttgtggatgaggaactgtgccgtcagatgcaggaggcaggaaatctttttcttgcgctcagtctcgaaggaaaaccggaagttaatgatcttcgccggggcgagggtgtttacggaaaggttatgcatgccatggagcttctgaaagaaaacggtcttgtattcggaacctccatctgttatacaagccagaatattgaaagtgttacaagcgatgagtttattcagatgctggtggaaaaaggctgccggtattctctgtatttccactatatgccggttggaaacgaggcttcaccggaactgcttcccacagtggagcagagaacatatatgcaccacagagtcagggaaatccgcaatatggaacatgggccgggactttttaccatggacttccagaatgacggtgagtttgtaggaggctgtattgcaggcggaagaaattattttcatattaatgcaaacggagacgcggaaccctgtgtatttatccattattccaatggaaatatcagagaaaatacaattcttgagatactgaaacagccgttatttatggcttaccacaacaatcagccgtttaacgacaatatgcttcgtccatgtcccatgctggagaatcctgagatccttcagaggcttgtaaaagaatccggcgcacattccacagatcttcagtcgccggaaaccccggaacatctttgcggaaaatgcgtggaatatgcagcgaaatgggctccggaggcagaaaggctctggaaagagacacaggagaagaaagcttccagatccttttaagaaaaaactacatttggtgatttgcagcagaaataatgcttttagtttttgctgaagaataaagaatacaggtatcttgaaatccgaaatatcaggatggaaaagagcctgtattttttgctttattttggtggttccatttttctgtgatttgtattagaataaatgataatgaagtcgtacaaacgcggcagcacatgatacaagatactgaataaggattggagacatatatgaaggttgtaattttggcaggcggatttggcacaaggatcagtgaggaaagccacctgaaaccgaagcccatgatcgagataggtgaaaagccgattttgtggcatattatgaaaatgtattctcattatggatttcatgaatttgtaatctgctgcggttacaaacagcatgtgatcaaggagtggtttgcagattattatttgcacaacagtaatattacctttgattttactcaggaaaacaaaatgatcgttcacaataatgtcctggaaccgtggaaagtaacactggtggataccggactgaatacgatgaccggaggcaggataaaaagagtcagggaatatctggacggagacacgtttatgctgacttatggggatggagttgcagatattgatctgaaggaacttctggattatcacagatcccatggaaaaatggcaaccattacagcagcccagccgggaggacgttttggaattctggatatctgtgaagatggaaccattacgaattttaaggaaaagaaaaaagaggacgggggctggatcaacgccggatttatggttctggaaccggagatcatggatcttattgagggtgacgatactgtgtttgaaaaggaaccattggtggaggcagccagaagaggagaactgaacgcttaccggcacaagggcttctggcagtgtatggacacattaagagaaaagaatcttctggaagagctgtggcagaaggggcaggctccctggaagagctgggaataagaaaagaaaggagacaggatatgaagcgggagaaagaagcatgtcattgcaagaacattacctatggtatgattgaggatgcggtaaaatcaggcgcatctacctacgaggaagtccagaagcttaccggcttcggtaccggatgcggcaagtgcagagattttatccgttgtctggttcgcgatatagtggaggaaaatcagtaaaaaataagaaatgcaaaaagagtacagaccacctcagtatctgaggaatctgtactctttattatttaccgggaaaattcataccttctgtacttattttcctgagaaaaatgctctgcttttatgcttctgcgcagggtgtggaggctgtgaaccgatccagaatcccgctgctgaatttttcaaaaagctggccgtaaacggaacccagaatattgttcagaatacggaaaagaattgctcccggaagccccaggatggctgttgcgatcgccattgcgccaagcgaattaaatactgcctgccatttataggaagcagaaagtcctacgcccacacctccgattattccaatataaggaaaaatagaaggggaaaacagaagatagagggcaagaaaaacaacacctccgataatatttcccggaatacgtccctttacccggcctttcagatcatcccggaacggcataagtactgacatggctgcaattccgatccacatggttctgggaatatgaaaaagacctcccagaaagatcgcggtagatacgccaaaggtcacagtcagctgccagcgtgtccggagagaatcaatacggaattcttttacaacatcagagagagttcttttgtatgttctgctgcggtgatttctgtaaaaaacaattcccgtaagaagagcgcctgcggcaatagctgccagtctgagaagatagtcctttcctgtggtgtcataaccatagagaagaagataaccaaggacgatagtggaatgattggacatcataatgttgtggcagccaaggagaagaagcacaaagatgcaggctgcattaataagaagttcgccgaagagtccggccatattggcaagtcttgggccaaaggccagaatagaaaagataattgccatagaagcaagggagccagtcatcttcattccaaagtctgcatttcggaaaaccataacacagaggagaataataacgcctacgatactgttttcatctccgaaaattttgccgtatcccataacaaaggccacgcaaaataccatggtaataaaaatcttaaacagataaacaagtgtgtgatgcagcttttcaccggaggttgcacagcttttgataagtgattttgaccccgcctgatttaactgcagttcctgataaaatgtcatgaaaacgctcctttctgctgagttatcggggaggaattatatcatcaggaataaggtttgtcaaatgatatttttatgtccattttgtgaaaaaagaaaatgtcctgcgaatgtacagcggatatggctttgaagaaactgtcataatgatgcagagaatgagataaacagaaaactcccgaaatccatatacggatctcggaagttgatttttaataaatgctcagtatcatatagataaatcctgctgccagcatatctacaggaagacctcggaaggcctttccggtgcgggcaaattttaaggtctgttttacagaaaggaacagaacaacaggaacaaggatgatccataaggttccgggaagaccgccaaagctttccactgtaaacgggtggaacaggataaaggcgggaatcgccggaaacaggctgttcattcctttgcagtctttttttaggattccgtttgtaaatgccagtacaagacctgctgccaggaaagcgaagattgtctgctggaaggcctttgactggaaggaggctgtcaggagtgtgtttccgaaaatacttccggttcccatgaattcacggaaaatggcaagcaggatccacagtccccaggcaatggctgactcccagaggagttcgccgtattcagcctctgtatttcctgaaagagcgtgtctggcgcacagaagtcccacaagaaataccatgatccaaagctccgttgtcagcgcagttcccagaaccgcaaagcccaccagaaaggctgaggcacagacagagccggaggcaatatatacacagagctgaaggctccatgcaggaacagctttttccaggagatttttcagcaactctgcaaatacagaggtaaaaatcaccaggattccggctgcaaaggcttccttcattcctgcggaaaaaagaatgattcccagggcaaaggcttctgccggatatcttaatttcatagtgattcctccgttttcttatttaactgtctgtaagaagttatatgcatcgttgattccgtttacggctgcagtagaagatttggtagcgccggaaacagcgtcgatctgagttccctctcctgatgccggagcttcttcttctgccggagcttctgttgcctcaggctcagcagcttcgataccggaagcctgctccagacactgagttgccagatcaataaatccgtttacagaaatacttacgcctgtaactgcgtcagttttgccttctgcgtcagtggtaaggaaggaaagtgactggttttcaatgagagcttctgcaagagcttcagcctgagccttccatgtgaggccgtcttcagtcattgtgtattcgccgttttcggacataatgctctttttggaaccgtcctctgttacagcatcccagcttgtttctgtgatagcgccgtcttttacagtcagagtaacaacatcggtaaagccgttggaatccggttcagatgtttttgcttcataggttccgtcagtgagctctgcccctgcaaacggatcctcctgtgccggctcaagtcctgcagcctgtttcatacactgagcagccagatcaataaaaccgtttacagaaatacttacgcctgtaaccgcatcagttttaccctctgcgtcagtggtaaggaaggaaagtgactggttttcaatgagagcttctgcaagagcttcagcctgagccttccatgtgaggccgtcttcagtcattgtgtattcgccgttttcggacataacgctttttttggaaccgtcttcggtaacagcatcccagtttgcttctgtgatagcgccgtcttttacagtaagagtaacaacttcagtaaaaccgttggaatccggctcagatgtttttgcctcataggtaccgtcagaaagctcagctccttcaaggactgtaagatctgtttcttcctttgcaggctcggcttctgcgctgctgtcctcagaaccggcagaaacgtccattcccggaaggaaaacaggagcttctgcgcctttgaactggtcaaggaactccggctctgtgatcttggaaccaagtccgtcagtttctgactgctcaactacctgaacctctgtgatcctggatgcggagctgtcaaaagcaacgtccataacaatatcgcctacataacctttggtgcggacagttaccaggtagccgtcttctgtttttccggctttttcaatgttttccgcgccgcttacatcaaattcttccagagtttctgagctttcaccggaagcgtctccgcctgcgctgagagcaagagattttgagccgatgattacgccgaaagacagtgcggtcactacaaccagcgccagaattccttttacttctttatttttcatgatttttcctccaaattaagctttttttactccgtatacatgttttttatagagaagagacaatgcaccgcccagacagttggctgtcaggattccaaagcagattccttccggataaaaactgaagatacggatcgctgccgtgatgattcccgcagtgactgcgtagagcagccgtcctcttcttgaggcaaatgcatagtctgtaagcatatagcatgcgccgaggatcaggccgccgccaaaaaggttcaggagaatatctccggtaaataatcctgccggtccgaagataaaggtcaggatgattactgttgcaatgtaagtaagagcagcctctgcgtttacgattcccataaagcacatgtaggcaaatcccacaagaagcagaagcttgcttgtttctccaagggcgcccggtgtttcaccaaggaacatctgcagatagctgtaacctgcttctccgccgttttttactgttcccagaacagtggcagaagagacagcgtcaaaacctgtcgttgtcagagtgcggggagcaacatactgcataacggctcccggccataccaccatggtgaaaagacggcccatgagtgccgggtttacaaaattgcagccgataccgccgaacatctgctttacaacaagaatgctgaaaatactggaaagtgcaactacccacaaaggaacagtaaccggcatattaaatgccagaagtattccggtaacaacagcgctgaaatcattggcagtaaccgttttttttgtgattttctgccagaaatattcagtcagtacacagacggtaacagaaaaaccggtgatgtacagtgagcggatcccgaaaaagtaaatggaacccagaagagccggcatcagagaaattgcaacatggagcataatattccgcgttgtattggctgtgcggatatgaggtccggttaaagtttgtacctgattcatgattttttcaccgccctttctctgattctctgttttacgatatttctggctgcgcgggtacgcagggaaagctcgcgtcttgcagggcagatataggagcagcagccgcaggcaatacattcgcttgcgtacagcttttcacagagatcatagtcttcgtcaagaagagcaaattcaatcttatatggaacaagtcctgcagggcacacgctttcgcatccggaacagcggatgcagggctgttcttcaaagcccggttccggaagaatcaggattccggaagtattttttgtaacatggaaaagctctgtctctccattccagttgtttgccacacagggaccggtcatgggtccgcctgcgatcacgcggttttcggaaacggcaactccgccgcaaagctgaatcagctcttttgctgaggttcccacaggaacaaggaaatttccgggattttttaccgcgccggttacagtgacgattctctcagtaagaggacgtccgccaagaagcatatcagccgctgctttggcagtgcttacattggaaacgatcactgctgaatcagccggaagacctcccatgggaacttcacgcccaagaactgcctggatcagctgacgttcgcctccctgtggatattttgtaggaagaaccttgatctctatgttttcttcctgacccatcagaccggaagctgtcatttcagccagaattttgttaagattttctgcagccagaggcttgttgtcttccagacacacataagccttggatgctccgcttgccttgagaagaatacggacgccgtttaaaagagcgtagccgttttccagcataaggcggtaatcacaggtgagaaagggttcacattctgcaccgttgatcagaagatctgtaattgttttgtcggtttcatattttttatgggtgggaaagcctgcgccgcccatacctgtaagaccgccgtcacggattcctgtcaggatttcctgactggagatgttgctgatgtcagcagcccctttataataggaaagttctgtgtttacttccggatcagtttctttctgtacaatacatgccatgatgctgcgtccctgttcctgaacctcttttatttcaagaactttaccgcttacgctggcgtgaaggggagcggccatgaacgcttcaggttttccgatcagctggcctttttttatatgatctccgggactgacaagaaaactgcactttcctccaaaggactgttctgaaaggatcgtaacagtttccggacagtaaggctgtacggcagaatccatggacagagctttgtcaaagccgtctgtaggatgtacgccgccggggaatacagatttttttcgtttctgcatgtcctgacctcctttacttattttgtggttcattattgttaaatagttcacattccgaatcaacataccatatgaataggaattacgcaagaacgattttataaaattatctgtaaaaattttcttctggaatttactatgtgcagtcttttgtgataagatgcataagaaaacataaaaaataaaattcagtatcagatgaatgaaatatatgtgattttgtaaaaaaaggaggcagataacagtgaaggcggcaggctgtgattattgtgcaaattatgtttatgatgatgagacagaaacttactactgtgatgtgaatctggatgaagatgaatactaccggtttcttacaggaaatatgaaggaatgtccttattaccgtaacggggatgaatacagagttgtacgtcatcagatgtaaagatcagggataaaccaaagcaaaagagaatggagatttttaaatggtaacaatggaactggataatttcagtctggagcagatctgtgattccgggcagtgttttcgtatgaaaaagactggggagaatacctattctctggtggcagggaatcagtatctggaggtttctcagaaaggaagtattgtggattttaactgcagcgatacagaactgatctgtttctgggttccttattttgacctggatgtagattacggcgcttatatagagaaggtaaattcacgggatcaatatttaagcaaggccgcggctcatggaagcggaatcaggatacttcagcaggatctatgggaaatgatcgttacgtttctgatctcccagcagaataatatttcccggatcagaggatgcattgagagactgtgcgcccgatacggagaaaagcggatctcgggaaacggagtggaatattacggttttcccggccctgagattctggcggaggccacagaacaggagctgagagagctgggacttggatatcgcgcaaggtatattgcggagacggcccgcaccattgtaaaaggagaaatttctctggaaaaaatttacaggatgcgttattataatcgtgcaaagaatgagctgatgaagctctgtggtgtgggagaaaaggtggcggactgcatctgtctttttgctcttcatcacatggacgcttttcctgtggacacacatatcaggcaggttctggatgaacattataaaagaggttttccgaaccgcagataccatgggatcagaggtattatgcagcagtatattttttattatgaactgacagaagggagaaggtaatatgaatttccagtttgcgcactataattataatgtgatcgatcttgacaaatctatccggttttatgaggaggctcttggactgaaagaaatcagacgcaaagaggctgaggacggaagctttatccttgtttatcttggagacggagcaaccggatttgagctggagcttacatggcttcgggattgggagaaagatcactataatctgggagataatgagatccatcttgcatttacagtggataacatggaggaagcccataagaaacatcaggaaatgggctgtatctgtttcgagaatcctgccatgggaatttattttatcaatgatccggacggatactggctggagattgttccggcaaaataatacagaaaaacaggcagcctgcataacagcggactgcctgttggatttttcagaccttttcttttcggtcgctgcgccccacaagataatcaaggctgatattataataatccgccaggcggataagcatttccacaggaatatctctggagcctgtctcataatgtgaataagatcgctgactgatatggagaatttcgccgatctgcttctgagacagatcagaatctacacgcaaatcctgaattcgctgaaatttcatgcaaatacctccttttgcaaaaagtataggtcggaacttcctgtgctattcagatttggaacgaaatggactatacagaaaaaaggcagaattgtggaaaagtatgcggatgtccggtaagacaatgaaaaggatggaaaatacaaagcttcagaatcataagaattgtattttggataagatttgattataataggcacaaagattttattttgagggaggtatgaaaatggaatatgcagtttcggttattaaaaatgtcctgggagccctttatcagaccggcggcgcttctctgatcattgcagcgctgtttatgagcgtatatatgagaataaagaaaaaaggaacaggggcagtgattcaggcatggatcagtgagtttcgcagcagcagtcagtttcgaagagaatttcttctggtgttttatgtgtgtatgatgctgttcagaaccctgctgtgcagaccgatctggggaaatcccctggacagcgttatgggaatctggggtattcataagccggatgggacaatttacacagaaaatattgagaatctgattctttttatcccgtttatgattcttttatactgggcggaggaaaaaaagacagacagacgaaaaatgcctgtacagagcgttcttctgaaaagcctgtggctcagctttattgtttctctttttatcgaaggatgtcagctgtttctgaagatcggaaccttccagctgacagatcttgtgttcaacagtctgggaggacttctgggaggcctgatctactggggctttgaccgcagccgcaaatatatttcggaaaatgtgaaaaaaataggaggctgggatgttgagccctggaaagctccggaaactgagacagctgaaagtatctcttctgtgtcaggaacagcagccgaaatctcagaagaacagccaaaagaagaaaaaagcagtgtggattataaaagtattgagcttctggtccgtcaggcaggacaaaagctttatcaggccaggccaacccgggaaaatattcacaaaaaagaaggccttgccaatttctgtacggattttgacacagcgatccagaaatttctgattgaggaactggaaaagcttcttcccggagctgcgtttttcggcgagaaggatacagagggcaatcagggagcaaaggcctgtggagagtataccttttatattgatcccatagacggaacaacaaactttatgtttggctatcatcacagctgtgtctctgtgggactggctcatcagggaaggataatcgcaggatttgtatataatccctatgtggatgaaatgtataaaggaatccgtggtcagggaagctggctgaacggacagaagcttgaaatggaaaatatttctgttggggaagggattgtggctttcggatgcgcaagatataatgaggacggagcggacagctttttccgtgcagtaaaggaactgtatatgaagagcctcagcatcagaaacggaggctcggcagcccttgatctttgcagaaccgcatccggaagcaatgcggtatatctggaaatgaagcttcagccgtatgattttgcggcagcgtccctgatcgttgcggaagcaggaggcatcatcagtcagtttgacggagcggcggttactctggacggtccgtgttctgttgtggcaggcgccgcaaaagcctgtgaggagacaagggagatcataaaaagctgcagataaaagaatttgacaggatatggtgaatgaatggtgaaaatacataaaattcttaccgggcttgccctttggggaattatcagtgcaggtgcggtactgtgtccggtttgggccggcgcaaaaacagaaaaatatacaaatacagattttgcaatgaatacagtggtttctgaaaccctgtatacaacaggaaaaaatctgaatccgtcagtgggagagcttctgaaaaatacagaagaaaatcttctttcctggacggaggaagactcccagatcgcagcgctgaatgcggcacaggggaaaactctggaagtttctgacgagcttgcaggatatctggaaaaaatacagcagctttccgtggattcggagggagcttttgatcctactatcggaaaaatcattcgactgtgggatatcgggggagaaaacgccggcatacccgctcaggaggaactggataagctgctgaaggaaaccggttatgaaaaacttgagcttgatggaaataaagtgaccttaaaagacggggcaacgctggatctgggagcagcaggaaagggaatcggatgtgaccttgtgatggatctgctgaaaaatgagaaagaggtttccggtatgatcctgaatctgggaggcagcagcgtaatggcatacggagaaaagccggatcagtctgactggagggttgcagtaaaagatccaagagacccggaaggagagtatctgggagccatcactttaaaagggggagaatttctttccacctcaggcgattatgaaagatactttatggagaatggaaaaagatatcaccacattctggatccggaaaccggttatccggtgtggaatgggctgacagcagtgaccgtagtctgcgacagcggaattatggcagacggtctttccactgcctgctttgtgctgggaaaagaaaaagcccttcctcttctggaaaaatacggggcagatgcgctttttgcagatgagaaccacaaggtgtatcttacagaaggaatggaagagcgttttgagctgatgaaggatacctataaggtacagaaataaaatattggacaatgtaagggaagtgacttaaagatgaattctttttgtcacttcttttgtcaggataccgatcagaagaccggtgatcatgccggagatcagaagtacaggcgcgtaataaagaagactggtgttttccacaatcagggcagctaccatcagctgaccgatattgtgggacacgcctcctgccacgctgatgccgagaatgctgaagccggaactttttttcataagagtcatgacaaagaggcttaaagctgctcctgccagactgtagataatggtgaacatatttccgaaaagaaaaccgatcacaacgatgcgcactgcagataccacagcggcttctttccaggtataggtttcaaggataaagagaacggcaagatttgccagccccagcttgattccggggattcccgcaaaaaacgggaacagggactccacatagccgaaaatgatggctacagcggcaaacagtccgagatatgcggtttttttattgttcatagcttatactgccgtgtcaaattccggagaagcttcttcggagccagcggcttttactccttctattacaactttattgggaaggcacacaatggtcccgcctgagttccctacagctttctggctgatgcagagatggtcgggacagtctgcctctgtcattttgatttttccatttttgatttcgcagacatttgtatcgccaatggcgatcacctggtcctttgcaagggaataggttccgtattccagaccgtttacagtgatacggacagaaccgtagtcgcctttacgcatcaggaacatgccgccccagagagcaagcgcagtaaccaggattgttgcgatcatgatcaaatccttttttttcaattcagaatcctctttctttatcatcattggttaaagtggtttccggtttggagcaggataaatcctgcagtttggtgtttatcatagcataaggcacaaaatatgacaagtcctgaagttagatgataaaaacacagtgcggatctgaggagaaagaaggggactgtttactgcggctgcactgataaaagggcaatattcagggactgcgggtaaaaaaattcattgttttccatgtgagaaagtgatagaatagaatggattaattgtattaacctaattacggaggattccgtaaagaagattttatataaaataaagacaaacaggagtatattatgaatgtgttttcaaaggtattcgggacgcacagccagcgtgaggtaaaacgtatcatgccgctggtagaaaagacagaggctctgcgcccggagatgcagaaattaactgatgaagaactgagagacaaaacaagagagtataaaagacgcctggaggaaggggcgaccatcgacgatcttcttccggaggcttttgccacagtgcgcgaggcagccaagcgtgttcttggaatggagcattaccgtgtccagatcatcggcggtatcatccttcatcagggacgaattgcggaaatgaaaaccggtgaaggtaaaacacttgtatctacacttccggcatacctgaacgctctggaaggcaagggtgtgcatattgttactgtcaatgactatcttgcaaagcgagatgcagagtggatgggcaaggttcacgagttccttggtctgactgtaggcgttgtactgaacgacatgaagccggaggagcgccgggctgcctatggctgtgacattacctatgtgacaaataacgagcttggttttgactaccttcgtgacaacatggttatttataaggaacagcttgtacagagagatctgcactactgtatcatcgatgaggttgattctgttctcattgacgaggcccgtactcctctgatcatttccggtcagagcggaaaatccaccaagctttacgaagtgtgcgatattcttgcaaagcagctggaacgcggtgaggcaagccatgagatgacaaagatggcagccatcatgggtgaagaggttgttgagacaggagattttgttgtaaatgaaaaggacaagatcgtcaacctgactgagcgcggtgtgaaaaaggttgagaaattttttaatattgaaaaccttgctgatccggaaaatctggagatccagcacaatgttattctggctctccgcgcccacaacctgatgcacagagatcaggattatgtggtaaaagacgatgagatcctgattgttgatgaatttaccggacgtatcatgccgggccgccgctattctgacggacttcatcaggctattgaggccaaggagcatgtaaaggtaaaacgtgagagcaaaactcttgcaaccattactttccagaacttctttaacaaatatacaaaaaaaggcggtatgacaggtactgcgcttactgaggaaaaagagttccgtgatatttacggaatggacgttgttgagatccctaccaacaaaccggtacagcgtaaagacctggaagacgctgtttatatgacaaaaaaagagaaattcaatgcggttgttgaggctgtcaaggaggcccatgcaaaacagcagccggttcttgtaggtacgattactattgagacttctgaacttctcagcagaatgctgcgccgtgaaggaatccagcacagcgtgctgaatgccaaattccatgagcaggaggcagagatcgttgctcaggccggacaggcaggagcggtaaccattgctaccaatatggcaggccgtggtacagatattaagctggatgatgtgtcaagagaggccggcggtctgaagatcatcggtactgagcgccatgaatccagacgtattgacaaccagctgcgaggacgttccggccgtcagggagacccgggcgaatcccgtttctacatttccctggaagatgatctgatgcgtcttttcggttccgagcgtctgatgaaaatctttacctcacttggcgttgcagagaacgagcagattgagcacaaaatgctttccaatgctattcagaaggcacaggaaaagatcgagttcaacaactttggtatccgtaaaaatcttcttgactatgaccaggtaaataatgagcagcgtgagattatttacaaagagcgccgtcaggtactggacggagagaatatgcgtgattccatctataagatgatcacagatattgtggacaatactgtggacagatgcttctcagatgatgtggacgcagtagaatggaacctggatgaatttaactccattcttcttccgatcatcccgatccaggctcttactcaggaaaaagtaaagggcaagaagaaaaatgagatgaagcatattgtcaaggaagaggctgtgaagctttatgaggcaaaggaatctgagttcccggaaccggagcagcttcgtgagcttgagcgagtggttcttctgaaatctattgacagtaagtggatggatcacattgacgatatggaaatcctccgtcagggcatcggccttgtaggatacggacagagagatccggttgttgaatataagatgagcgcttacgatatgttcaatgaaatgacaaacagcattcaggaggatacagtccgcatgctgtatcatgttcatgttgaacagaagatcgagcgtgagcaggtggcaaaagtgaccggaacaaataaagatgattccagcgcccgcaagcctgttcagagaaaagaggacaaggtttatcctaatgatccgtgtccctgcggaagcggcaaaaaatacaaacagtgttgtggacgtaaaatgatgaaagcataagtaaataaagaaacagaagggctggtcacatctgatgacggcccttctttcatataaacacagaaatattaagggaacagattatggtctgtcaggagagaatatgataaaaattgatttgatcacaggattcctgggatccggtaaaacaactttcataaaaaaatatgcttcttatctgctgaaaaaagggatgaacataggaatcctggaaaatgatttcggagcagtaaatgtggacatgatgcttttaaaggaactggaaagggagaactgtgagcttgaaatgattgcgggaggctgtgaccgggaaactcacagacgcagattcaagacaaagctgatcgctatggggatgtgcggatatgaccgggtgattgtggaaccttccgggatttttgatgtggatgaattttttgatgctctttatgaggagcctcttgaccgctggtatgaaatcggcaatgtgatcactatagtagatgccggactggaagaaacgctttctgctcacggagaataccttctgggatccgaggctgcttcggcaggctgtgtggtgttcagcagagcaggggaagcttcagcggaaaaaataagagaaacaacagcgcatctgaatcaggcaatggaagcgatccggtgcggcagaagatttggtgaagatattttctgcaaagactgggaaagcctgtctgataaggattatgaaatgcttctgaactgcggataccgtacagagacatatgaaaaacagcattttgacggacaggcttttcagtctctttattttatgaacacaggaatctgtgcagaaaatctgaaagaggcagcggaaagaatcatgtcagatacagactgcggatctgtgttccgtatcaaaggctttgccggaaatacagagggaagctggatgggactgaatgctgtcagggaaaaggctgatctctgtccgattgatgcaggacaggaagtgattattgtaataggggagaatctggtaaaagaaaaaattgaatcacagttaaattttttgcctgataattaacatctgttcagttgtggtaagggtgcggctctggtatgataaaagcagcaaaggccgatgcgtaaatcaaacagagaaggagaattgccatgaaaacaggtgaagtgatcagaatgtacagaaaaaacaggaatctgactcaggaagaaatggccagccgtctgggtgttacagctccggctgtaaataaatgggaaaataatgtttcccttcctgatatcacccttcttgcgcccattgcaaggcttttggagacaactccggatacccttctgtgtttccgggaagaattaagccaggaagaagtgaacgcttttgtgcaggaagtcgatgaaaaatttcagaaagaggactatgaacaggcttttgaattctgccggaaaaagatctgtcagtatccgggctgtgacaggcttgtggtacagcttgcctcagttctggacggctggcggatattgaagaagatcccggaagaagagaaatatgaccgggaaattcttgggtggtataagcaggcattggaaagccaggatgcggagataaaggaacgggcggcagaggcgctgttcagttattatctccgaaaagaacagtacgaagaagcagaaggctgcctgaactatttttctgtaaaagatccgggaagaaaaatccataaagcccttttatatgagaaaaaggggaatcgtccggctgcctggaaggcatatgaagagcttttgttccagactggaaatattgcggaaatggtgcttggcggactgttttccctttcggaaaaggacggagatctggaaaaagcacggatgtttacagaaaagcttatacagcttgcagagctttttgaaacaggcgaatatcataaggcaactgcgagaatgagccttgctcttgcagaaaaggacagaagccggctggaacgacagatggaaaaagtgattgccgctgtggatcagctggacttttatcgaaattctgaactttatgcacatatggaatttaaagagatgagtccggaatttgcagaaagcatgaaaaaaacgctgcgggaaagttttcagaacgaagcggtttatcagttcgcagagtgatttttcagatgtaaaaaagaaaaaatcatacgtatcatgaaagggtgacagaaacagcgccagatcgggaagacagctccggtttggcgctgttttaagcaaaggggttgacattctgcttttttcgtgtaattaatagggggataacaggtacggaggagaaaaaagtgggaaaaaatacaaaaattttatttacagatctggacggaacccttttaaatgatgaaaaagaagtaacggccggcaatcaggctgccatagacagagcgttggagcaggggcataaaattgtcgtaaccacaggaaggcctcttgcaagcgggctggatattgcagagaggatcggtctcacaaaggaaggctgttatgtgatcgcctttaacggaggacagatctatgatccttttcacaaaaaaacaatttatggcaaaaccttctcaaaagaggtggcgaagcccttgtttcaggaggccatggacagaggacttcatattcagtcctattcggacactcaggttctttctctgaaagaaaaccgggagctgcttttttatatcagcggatctacagtatcttataaaattgttccggatctggagtcggcatttccaaatgatccgtataaaatccttctggtagggctggataaccgtgcagaactggacagatatcaggaggaatgtgtgaatcctctgaagggaaccgtaagaggattcttttctacagaaaattttctggagatcgttccggacggtgtttccaagggtgtcgcagtaaaatggctctgcgagtatctggatattcccctggaaaattcagtggcagcaggagacgcgccaaatgatgtggaaatgctgcaggcagcctgtgtgggagctgtgatgaaaaacgcctacgagggaatggacagatacgcaacctatgtgacagagcgggacaacaaccatgacggcgtggcggaaattatagagaagtttattttaaaataaagagaagaagtaagactcccggtgttttgaacaccgggagtttttgcagtgtatataaatgagtgattatttttgtaaaaattgagccgtgtaagttactcagatttacttgactttctgtgagaaaagaggtatatttataacgtaaagagtgaaatataccacataaaggaggtaggcgtaaatgaggaaaaaatttaattatttaggtttgttatcgctgctgtccctggtttcccttcttgggaggattactgaaaataccgggctttatggatttttgggatttatctattttatacggtatttttggattatacctgatgaatttttccggcaaaatgttcagaagtctgcaacgtttgcttttatggcagaaatgattgcttttgttccttttatgtttatatgtgcttatatttatgatggaagcaaagctgtagcaactgcatttgcgttgtgttttgcagttgtgattattgcatttaccctttctcttgcatttcatgaatggagggagcagcggggggcattgaatgattaaaaatcgaattaaagaatatcgtgccagattcgatatgaaacaggaagatcttgcgagaataacaggagtcaggagagagactattggaaatctggaaaaaggaaaatataatccgtctcttgtattggcatggaacattgcaaaagcttttggtgtaagtattgaagaggtttttacggtagtagaagatacaaataactaaaatatatggagatgatgcttttggcatcatctctgtttttgttttaatacccattgacaacatatatactgtgtggtacgatgtatataaagaggtgaggtatatgaatattgacgactggaaatctcagattaaaagaggaaccctggaatttggaattcttttaatgatcagtcaggaaccctgctacggctacgagatcatcagcagactggaaaagtggccgattttatctgtaaaggaaaacactgtgtatccccttttgcgaaggctgctgaaagaggaatatctgtcttcctcctggcaggagacaacagaggggctgccgcccagaaaatattattcgcttacagaaaagggcagagaatatctgcagtgtatgaaaacagaatggaagaatcttttatctgcaatttcagacttggagggaaaagaaaatggataaaactttaaatgattatctggaaaaagttgataaatacctgaaacccatgaaggtaacagaccggatggacattataaaagaaattgaaagcgacatggcagagctgagagagcatggagggctttcggcaaatgagatcattgaccggctgggagagcccaaaaagctggcgcaggcatatcttggagaaacgatcacagaaacaaaagggatgagcttcagaaagcttggggcaatgatagctttttacagtatggcaggactgggcggcattattattcttccagttaccgggattacatcaatagccctgattctcagtggtattttgtgtccgctgtgtgggctggtgaagctgttggcatcctttgtgggatatgacattccgtttattggctttcagctgggaagcttttctgcatctccggctttgacattgattctttcgattattgtgggacttgtttttgcggcaatcggatggggcttatggctggtaacaaaggcctatatcagagctgtcagcgccgggtctaaaaaaatacggggaagaaaatagaacagtatcagtcactgtttacaggtttggcatgtttatgccagaatcccgggatatacagggcaaaattccttcgccgaaggtcatttggaaggtgttttccctgcccctatacaggtccggctctctgtgttatgataattgcagaaggaggcgcttttatggaacgggaaaatcacacatatatagccattgatctgaagtccttttatgcttctgtggagtgtcgggagcgggggcttgatccgatgaggacaaatctggttgtggcggacggcagccgcacacagaaaacaatctgtcttgcagtatctccgtctttaagagcatatgggattccgggcaggccaaggctttttgaagtggttcagaaggtcagagccatcaatactatacgaaagagaaaagcgcccggaggaagtttttccggggcttcgtatctggcgccggagctggaagcatacccggagcttgagcttacctatattacagctccgccaagaatggcattttatatggattacagcacaaggatctacaatatttatctgaaatatatagcgccggaggatatgcatgtatactctattgacgaggtgtttattgacgccactcactatctgaaaacctatggtatgactgcccgtgagcttgcaatgacaatgatccgggacgtgctgcagtcaacaggaatcaccgctactgcagggatcggaacaaatctttatctgtgtaaggtcgcaatggacattgtggcaaagcatatagaacctgatgaaaatggtgtcaggatcgccgagctggatgagatgtcctacaggaagcttttgtgggatcatcagcctcttacagatttctggagagtgggaaaaggctacgaaaagaaactcagggccaacgggatttttaccatgggggatgtggcgcgctgttctgtgggaaagccggaagatttttataatgaagagctcctttataagctttttggaattaatgcagagcttctgatcgatcatgcctggggatgggaaccctgtaccatccaggatataaaaagttacagaccctccagcaacagtgtaggttcaggtcaggttctcacctgcccctacagcttcgaaaaagccagactggtgatccgggaaatggcagaccttctggccctggatcttgttgacaagcgtctggtaacagaccagctgacccttacagtgggatatgatattgagaatctgaagaatccggagaaaaaatacagcggggaagtaaccacggaccgttatggaagaaaaatccccaaacatgcgcacggaaccattaatctgaagcagcagacttcttctgcaaaaaaaatcgtaactgctgtgatggagctttacgacaggatcatggacagagagcttctgataagaagaatgtatctggcagccaacaaagtggttccggaggaaatgatacaggaagaggaaacttttgaacagcttgatctctttacggattatgcggcgctggaaaagcagaagcagcaggaagaggctgtgctggagcgggaacgcaaaatgcaggaagccatgctggatattaagaaaaaattcgggaagaatgcaattctgaagggaatgaatctgcaggagggtgctacggccagagacagaaattcccggatcggaggtcataaggcttaggcggctctccgttctgataaaaaggagggcaggaatgaaaaattattttggtgaaacacataaatatgacgatatcatcaaccttccccaccatgtgtccgggacacatcctcagatgccggtggaggaccgggcagcccagtttgctccctttgccgcactgaccggatatggagcggccattaaggaaacagaaagatatacagaaaagagaatacagccggatgaggagagtgtggagattttaaacagacggcttgaatttatccgggagcatatcagtgagaagccggaggttacggtcacatattttcagcccgacctgaaaaaagaaggcggaaagtatatgacagtcactggcactgtaaaaaagatcgacacgttcagacaccggatgcttctgaaggatgaaacagaaattccttttgaaaatctctgggaaattgttttccaggaaaaataaaaagattatcacattgaagataaatctgtcatctgacagtggttttatcagaaattccatcagaaattcatctctggacggaaaaattcagcctttacggatgagaggatattctgtatactatactaaaaaggtcaataaaaggaggaaatacttatgctggaaattggcacaaaagcgccggcgttcgaactgccggatcagaatggagaaatgcatacgcttgaggaatataaagggaaaaaagtgattctttatttttatcccagagataatacaccgggatgcacaaagcaggcatgcggctttggagagctttatcctcagtttacagaaaaaggggcggttgttctgggtgtaagtaaagacagcgtggcatcccataagaaatttgagacaaaatatgagcttccgtttactttgctgtcagatacagagctttcctgtattcaggcatatgatgtgtggaaagaaaagaatatgtacggtaaaaaaactatgggtgtggtccgcaccacatatttaattgatgaggaaggcgtgatcgtgaaggcctttggaaaagtaaaggctgcagataatccggcgcagatgctgggagaattgtaaaatgaagattatcatatctcctgcgaaaaaaatgaacgtggatacagatacctatcaggtaaccggacttccggtatttcttgaggatacgaagcttctgatggatgagatcagaaggcttacctttgagcaggctaaggagctgtggaaatgtaatgataagctggcgcagcttaattatgaccgcttccggagcatgaacgtagaacgctgcctgactccggcagttcttacttatgaagggcttcagtaccagcatatggctccggaaatctttacagatacagctctttcctacatagacagacatttacggatcctgtcgggattttatggagtgctgaagccttttgacggagtgacgccctatcgtctggagatgcaggcaagattatctgtaaaaggaaaaaaggatctgtatgatttctggggagaccgattatacagggagctgacagaagaggatcacctgattataaacctggcatccagagaatattcaaaggctgtggaaaaatatctgacacctgaggaccgctttattacagtggagtttggacagcttaaggacggaaaggtaaagcagaaggcaactctggcaaaaatggcccgtggagaaatggttcggtttatggcagaaaataatgtctgtgacccggaagacataaaaacattccaggcgttgggcttccggtacagtgaagaacggtcagacaaaaataaaatgatatttttggcggaacaggataagaaataagatgatctcaacttttatgcaataagaatcaaggacatatgatagttctgtatattctgacattgcaggaaaacagaataatgtaatatttaaggacagatacagagcggtcagcgcttctgtatctgttttttctttatgataaattaacatcccttgtctggagtttaataccgactttataaaaacttgtatacaatgtctgagaacagaaaaaggggttactgtgaacgaaatgagaagtaagaaatgaggggttctcaggagcgtccctgcatgtgcagaaaaaagagcacagagaggagaggattattatgatggatattctgatgatagcggttcttcttggctgttttggccttgtgaagctgtttgcggatttctgtgaatcgcaggtgaatccgaaagaaaaataagaggaaaggcggagtaagattatgatagcattggggattatcattctggcgcttggaggctatcttgtatacgcgctgatatatccggaaaagctgtaaaaatttacagatctgttcagagaatgttggattttaatttatgtcaaaagggagagcaacaggaggagaaaaatgttacagatcattcttacgctggcaattttcctggtacttgtgattcccatgggaaagtacatgtaccacattgccacagaacaaaaaacttttgcagataaagtttttaatccagtcgatcatttgatatataaaatctgcggcatcaaaaatgaggatatgggctggaagaaatatgcccttactctggtaacagcaaatgctgtgatggtttttgtgggatacctgatcctcaggattcagaatcttctgtttctgaatccaaacggtattgagggaatggaatcaagtctttcccttaatacgatcatcagttttatgacaaacaccaacctgcagcattattccggtgaaagcggactttcctatgcagcgcagatgtgtgtcatcatttttatgatgttcacttcagcagccagcggttatgccgcatgtatggcattctgcagaggactttccggaagaaagctggggaatttttacagagatatggtaaggatcacaaccaggatcctgatcccggtatcttttatagtaggtctgatcctggtaagccagggaacaccgcagacactgatgcagaactttacagtagaaacggttgaaggaaaatatcaggattttgcaatgggaccggtagcggctcttgaatccatcaagcatctgggaacaaacggcggaggtttcttcggggcaaactcaaccacaccatttgagaatcctactgtgatctccaatatggttgaaatgctttccatgatgattcttccgggagcctgtatcgtaacctttggccatatgcttaatgaccggaagaaaaacaaagtaaaggcaacagctgcagcagtggcacctgcaaagaaaaaaatccttatgggacgtcagggcgctgtagtatttggcgcaatggcaatcctctttatggtcggactgctattatgctacaactcagagatggcaggaaatcctgtgatcggtgaaatgggaatcgaccagagcgcaggaagcatggaaggaaaagaggtccgtttcggaactgcccagtcctccctgtttaccacagtaaccacatcttttaccacaggtacggtaaacaacatgcatgatacactgactcctcttggcggtctggtgccaatgcttcatatgatgctgaactgtgtgtttggcggcaagggcgtaggacttatgaacatggttatgtatgtgatcctggcagtgtttatctgcggccttatggttggacgtacaccggaatatctgaataaaaaaattgaaggaaaggaaatgaagctggtagcaattgtaattctgatccatccgcttctgatccttggtttttccgcactggcagttgcggtttccggaggactggatggtattacaaatccctcgttccacggactgagccaggtattgtatgaatatgcttcctcggcagcaaacaatggttccggttttgagggactggctgataacagtgtattctggaatgttacaacaggaattgcaatgttctttggaaggtatattgctattgtagcgcagcttgcaattgccggttcccttctggccaagaagagagtgaatgaatccattggtacactgagaactgacaatgttgtatttatgatcgttcttgtatttattgtatacatctttgcagcactgaccttcttcccggctcttgcactgggaccgatcgcggagcatctgtcgctgtggatgtagtagatgcagaaaaaaggagaagagaaacatggctaagaaggaaaaaacaaaattcattactccggatattctgaaaacttctattattggagcattccagaaactggatccaagatatatgatcaaaaatccggtaatgtttgttgttgagattggatttattattactttgattctgactttctttcctacaatgtttggaggaaatgcagagtacagaatttataatggaattgtaacagtgattctttttgtgacggtgctgtttgcaaactttgcagaatctgttgcagagggacgtggaaaagcccaggcggcttctctgaaaaaaaccaaacaggacacaaaggcgcgggtacttctttcgggcggacaggaaaaaacaatcaatgcgtctgagctgaaaaaaggcgatattgttcttgtaaaaatgggagaggtaatccccaatgacggcgaggttattgaaggaatcgcttctgtagacgaatctgctattacaggagaatctgctcctgtaacaagagaagcaggcggagatttttcttctgtaacaggtggaactactgtagtatctgactggcttaaaataaaaatcgttgctgaacctggagaatcttttctggataagatgatttctcttgtagaaggtgcatccagacagaaaacaccaaatgagattgcgttgaacacacttctgattgtactgaccctgatcttcctgattgttgtggtaactctttatccgtttgcaaattaccttggagtggagattccggtatcatgggcaattgctttgatggtatgcctgattccaactactattggaggacttctttctgcaatcggtattgctggtatggatcgcgttacccgttttaatgtaattgcaatgtcaggtaaggctgtggaagcctgcggtgatgtggataccatgatacttgacaaaacaggaaccattacttttggtaaccgtcttgcggcagaattttatccggtggaaggcgtggataagaaagatctgatcagatacagcgttctgtcttctctgcttgacggaactccggaaggaaaatctacaatagatctgggcaaaaagatgggatgcgatccggacagtctgaacacagaaggaatggaatttgtagaatttaccgctcagacaaaaatgagcggggctgactgtaaagatggaaccatcatcagaaaaggcgcatacgaggcaattaaaacatttgtacaggaaaagggaggagagattccttctgacctggaaggcattgtaacagaagtttccaaccttggcggaactcctctggttgtatgtgtagatgccaaaatttacggagttatttatttgaaggatacagttaagccgggactggtagagagatttgagcgtcttcgtgaaattggtatcaaaactattatgtgtaccggtgataaccctctgacagcggcaaccattgcaaaggaagccggagtggacggatttattgcagagtgtcgtcctgaggacaagatcacagccattaaaaaagagcaggcagaaggtaagctggtagccatgacaggtgatggaaccaatgatgctccggctcttgctcaggcagatgtaggtcttgccatgaactcaggaacccaggcggcaaaggaagccgcaaacatggtggatctggattctgaccccactaagatccttgaggtagtggagatcggaaagcagcttctgatcacaagaggatctctgacaaccttcagtattgccaatgatattgcaaaatattttgctattatcccggcaatgtttacactggtcctgccacagatgcagattttgaatatcatgcatctggctactccggcaagcgccattctttccgcactgatctttaatgcgatcattattccggcgctgatccccattgccatgaagggagtcaaatataaacctatgaaagcagaaagacttcttctcagaaatatgggtgtgtatggacttggcggaattatcgtcccgtttgtgggaatcaagctgatagatctgattgtagctccaatgcttgcaatgcttggaatgtaggaggaatgtttcatgaaaaagtttggaaaaatgctgggaaaggcatttgtattctgtatagtgatgatcgtgctctgttcatttgtctatcccctcgccctgacaggtgtgagtcagctgaccatgaagaataatgccaatggaaacctgatcgacaaaaatggagaaccgaccaataatatagaagaagctgtgggttccgaactggtaggccaggattttacagaggattattttttcagaggaagagtttcttctgtaaattataatacatacacagaggagcagaaggagaacggagaatatacaggcgtatcttcaggaagctttaactatgcaaattccaatcctgaactgaaaaaaagaattcaggaggatctgaatgagtttctggaaactcatccaggagtaaaaaaagaggagattccttctgatcttctgactgcttccggttccggacttgatccacatatcagcccggaggcggcccaggttcaggttgcggcagtagctgaaaattccggactttctcagcaggaagtacaggagattgtagaagaaaacacagaacataaggtgcttggcatttttggagaagaaagagtaaatgtgctgaaatgcaatcttgatattgcaggcgcaatgggactgatctgacagaaagaagagggcagaatggaagatataagacctgattcagaatatctgttaaaaaagcttcagtatgaggaagagcagaagctgaaaaaaaataaagggaagctgaaaattttcctgggatatgcggcaggctccggcaaaacctatacgatgctggaagcggcccatgaggcaaaaaaacataacatagatgtggtggccgggtatattgaacctcatgacagaccggacacacgcagacaggcggaggggttagaaaccattccgcctcttgtggcagaatataaaggagtaaagctccgggagtttgatcttgaccgtgctctggagcggaaacctcagctgattcttgtagatgaactggctcacaccaatgcagccggctgcagaaatgaaaaacggtatcaggatgtaaaagagcttctgcgggcagggattgacgtttataccaccattaacattcagcatctggaaagcctgaatgatctggtgggatcgattactcatatagaggtcagggaaaggattccggacagtgtatttgaccatgcggatcaggtggaggtcattgatattgagccggaagaacttctggaccggatgaaagagggaaagatttacaagccggtgcaggcagaacgcgccatgaaccatttttttaaaagagagaagcttgcggctcttcgtgaaattaccctgagacgcacagcggaccgtgtaaaccgtattgcagaagaggagcggaatattacaggggacatggactaccacacaggagaacatattcttgcctgcatttccgccgcggagtcaagcgcaaaggtcatccggtcagcggcccgtcttgcctatgcctttcgcgggcagtttacagggctttacgtggaaacacctgccatgcaggaagctaatgaaaagacgaaacagggtgtgcggagaaatatggagcttgcccgggctctgggagcaaaaatcgttacagtgtatggttctgatattggcagccaggttgcagaatatgcaatggtaagcaatgtttcgaaggtggttcttggaaggacaaaccacagattttttatgcgaaagccaatggcggaggtactggaaaaattgaacagtatggctcccaacattgacgtatatattatcccggatatgaaaaacagaaaggctgcaggaaaatacggtcacagagaagggcgcagaaaggcagaaaatgcaggaatgcaggcattgtgggaatttggactgatcaatataattctggttcttactacgatcgcagcctggattctccagaaatttcaccttccggaatccaatatcattatggtgtatattctgggagtgctgctgtcgtcctacatatctgacaaaaaaatctatgcggtttattcgtccctgttcagtgtgcttgcctttaattttttatttacagaaccgtatttttctctgaaggcttatgataaaggatatcccaccacttttgcaatgctgtttattgtggggctttttacagcgtcccagacaagaaagctgaagcttcagaacaaagaaagtgtaaaaaaggcttaccggacagagattcttctggaaaacagccagaagctccgccgatgcaaatccgaaaaggaggtctggcagcaggcggcggcccaggtggaaaagcttctggatctgtctcttgtgatctatccggtaaataaagacgggcttctgggagaggcaatgctgtttccccgtcagggaacagaaaaaaccagtctggaacctttgctgacttctcaggaaaaagcggtggcaaaatgggtggcagccaatcaccaccgggcaggagcctgtactcatactctgtcaacagcaaaagctatgtatttgcctgttcaggatgaggaaaatgtgaagggtgtcatggggattttcctggaggaacgcagacagatccaggagtttaagtacgggcttctgatcgctatgctcaatgaaacaggagtaaaactgaaggatcggttttgattctgctacttctgacagcttctgtatgcgtttatagccttgcggatcagatcgttgaatttatcagcgtcccaggctgcccggccggtaaagagaccgtcaatagagggctgtatgatcagttcctctgcattatcggaattaacactgcctccgtagagaacaggaatctgctcagaagcttcacagaacagctctctcagggtttcttttatgattttgtgcatggattccgcgtagtccggagtggcgggagtgccatttattccgatagaccatacaggttcataggcgatccataatttgtgaagctgatcggaaggaattccgtggaggccgattttaagctgagaccggagaacttccgggctgatcccatagtctttttgttcctgagtttccccgatgcataataaagcagtaaagccgtgttttaatgcggcttttatttttttgttttcttcaatgtctgtttctccgaatacatgtcttcgctcggagtggcctgccattacaagtccaagtccaagctcttttaacatcagtggtgatatttcaccggtaaactgtccctggtcctcccaacacatattctgggcgcccagaagaatctggttctgatcggtgcatgctgcagcctgttccagagcagtgaaagatggaataataaaaagctgaatatcgtctctgcttatatcgcttgtattttgcgtcagttttgcgaggtattccacagtatctctgacgtttttatacattttcagattgcttccaaaataaagttttttattcataatgataatcctcctgatggaatttttcttttgttttggctttattatatgattgtaaaaaacgaaaagcaattaggagaaatgtagtaaataatgattgaaatgaaagaaaacgaaaatacgaaatgaaacaaaagaaataaaggcattatattgtgcaaaatgtacaaaaatacaaatgaaaaagtgaatataaataacgaaaagtaaacatatacttgattttgtgaaaaaagtgagttaagattagaacatgaaaacgacggaaatcaaaataaaaataaacaaataacgaaaattaaatgaaaggaaaactgattaaaatgaaaagtgaatttaagcctgtaacggcagttacaatgggagatccggctggaataggaccggaaatagtggtaggaactatgcttgataaggaactgtatgattcctgtaaaatgttcgtaatcggaagtattgcaattttggacagagcggcaaaagttcttggcaaagaactgaaatacaataaaatttccagtccggaggaagcaaaatacgaatatggggttgttgatgttctggaaacaggtgattatgacacagattctattaaatggggcgaggttcaggagcttgcaggacgtatggctgttgactggattatgaaatcaattgagcttggaatggaaggaaaggtagatgcagtatccacggctccaatccacaaacgtgcaatcaagcttgtgggagtgaaagaacccgggcatacggaaatttatcagaatgtaaccaaatctccttatgcacttacaatgttttcctgccataagctgagagtattttttgtaagcaggcacatgtctctggtggatgcggtgcattttgctacaaaagacgttgtgctggaatttattgaaaatattgataaagaactgaggaacgtaggaattgacaatccatgtatagcagttgcgggtattaaccctcataacggagataacggactttttggaagggaagaaattgatgaattggagccggcagtaaaggcggctcaggagaaggggatcaatgcagtgggcccatgcccggcagattcggtatttcatattggaaagagcggaaaatttgatgcgattctttccatgtatcacgatcagggacatattgcatgtaagacctttgattttcagaaatcagtaaccattacatggggacttccgtttatcaggggatctgtagaccatggaacagcttttgatattgcgggaaaaggaattgcagactgtgtaagcctgatcgagtccacaaaggtatgtgtggaatatgcagtacgtaagcacgaaagagaaacaaagaagtaaagcaatacagagaagggaagaatgttatgccgattataggtgcagttgcagacgatctgacaggggcaaccactacaggggtgttgcttgcaaggtcaaaagcgaaaacagcagtgttttttaatgaagaagcagcagaaaaggcagagggtgcagaaaatctggatgctattctggtaagcagcaattcacgcccgcttccggcagatgaagcctatgaaaaggtaaaatcagctacccttgcgttaaaaagaatgggggtaaaatatttttccaaaagaatagatactacgcttcgtggcggagtgggaacagagatagatgccatgctggatcagttagatgaaaatgcgatagcagttgtggttcctgccatgcctcaatccagaaggatactggtaggcggttattctatcatagatggagttgctttgatcaatactccggtagctcaggacgtgcgtactccggtaaaagaaaattacatgccaagacttctggaaggacaaaccagaagaaaagtgggacttgttactctcgactatattctgaagggccgggaggacacagaaaaaagactgatggaagtacgtaaagaaggctgcaaggttattgtagttgatgcgattactcttgaagatgttgaaacgattgcagacgcctgcattgctttgaattggaatgtggttgcagtagatccgggaccgtttacagctaaaatggcctacaggcgagggttgatcgggattgaggaacctgatataccggacgaaaaagagcaacctggaaaaacagtgcttgttgcagccggaagcgcaactccggtcacaaaaaaacagatggaggtcctttgtgaggatccccgccatgtaaggatcagtgtgaatccggttcctttgataaatggaggagaagaagctttagaggaagcacttaaagcagtgaatactgcagccgatatgatgaaagcccaaaaggcacccagagcgatcctgtttgagacagctcttcatggagaacttctgaatctggaagaagaggatcggaaacacggttatgcggacggaatgagcgccaatcgtatcaatgcaggtctgggaacaattatttcccgtcttatggaagaggtgggaagagaaaaaatagccggactttacacaacaggcggagatactatggtgaacgtgtgctatcagcttggagtggaatgcattcaggtaatagattatgtaattcctcaggcagatataggaagactggtgggaagctatgacgggcttccggtaatcggaaaaggtggtctgaccggaaatgaccatacagcctgtgatattgtagatcgtttgtttaaagaagcagaaagaaaataaaggaggaaacagaaaatgaagctggcaattggatgtgatgaagcagcatatgctttaaaggtggaaatcatgaagcatctggacgagattggtgtggagtataaggacttcggagctgacaagggagaaatagtcttatatccggatgtggccaaaacagttgctgaggctgtggcagcaggtgaatttgaacgtgggattcttgtatgtggaacaggaattggcatggctattacagcaaataaggttccggggatccgggcagcagtgtgtcatgatccgttttctacagagagatccagaaaaagtaatgatgcgcagatcatgtgcatgggggagcgtgtgatcggcgtggagcttgcgaaatatctggtagatatctggctgaaatgtgattttgcagggggcggatctgctcctaaggttgaacgtattatggaagtagagcgttcctatcactaagcgaaaaaaggagaatggtattatgggtgaaaacaaagaaaaaaacaaaaaagaaccaaaagatcttgatcttttaaataagatgaaaaacctgcccggagggcttgttattatacctctggttattgcggttctgcttgcaacctttgttccgcaggtatttcagatcggagggtatgtaactgctttgttttatgaaggaaattcctgtatgatgggattcttcctgattgtgtgcggttctatgatcaatgtaaaacaggtgggtatgcctctttataagggcgcgattatgacaggcgtaaaatttgcgctgggtgttgctgttggcgttcttgtaggaacgatctgcggaccagaaggattcctgggaattgcaccttttgttctgattgcaacaattacaaattccaacggctcgctgtatatttccctttcttctcagttcggaaatgccacagataccggagcgatttccattctgtctctgaatgacggaccgttttttacactgatcgccctgggcgctacaggacttgccaatattccgattaaatcactgattgcagttctgattcctcttctgatcggttttgtctggggtaatctggataaaggctttcgtgatgcatgtaaaaccgcacagccaattgtcactttctttatgactatttcaattggcgcaaagacagatgtaaagacaattttgacagcgggagcgtcaggaatcgttctgggtctgatttcagcagcgacagcagtattgtttttctttattatcaatctgcttcttccaaaaaaagaaagaaatgcaatgggagcagcgattggaactacagctttaaattctgcaatgacaccggctgcagtagcggaagcagatcccagtatggcgcagtacacaagtatggcaactgcacagtgcgccacagcttctattattactttgttcctttgtccgtttattacagcggcatttgacaaatatatgatgaatcataagaaaggtatctacagcccggaaggatgggcatacgaaaaagcacttgccgcagaacagaaataggttattgtatataagtccttttgtatgttaaaatataaaaggactttttacaaaacttttcttaatttagaaaggattgtgaaaagctcatgaaaaaaataacagttcatatgacaaaagaggcgctatttgactttcttctgtttcacgcttattcgaaattcagcggatttctggtgaatattctgggtcttgctgttgcgtttatggggatcattctgtatatatcagataaagccagcacgttgaacctttgtttttatcttggagctgcattcctgtttctgggatatacaccgttacagctaaaaagaagagcggcaggtcagatgaagataaatccacagtacgcacaggatgtagattataccttttctgatgaggggattctgatggaacgtggaaatatgcaggaaacctatcagtggagcaagattcagaaggctgttgtgactccgaaaacaattgggatttattatgagccggagcgtgctctgattatacctaaacaggattttggagagcagtttacaggtatatttcagttgattgccatgaatctgggagcatccaggcttcagatgagatagaagagttgttttcgaatgagtccggaatgatagcgtctgtttgtaagcagtattgagggtgggaaaatgcaggaacgcagacgaataatattacagagactggaagagtatggctcagtaaaagtaaatgaattgagcagtgagtttggatgctcagaagtaacgattcggtcggatatccgggcgctggaaaaggagggaaagctttccagaacgcatggaggcgctgtgagaaaagaagaggaaggcggtgtgatccattatcgcgcagaaagcctttatcgaaatgtggaattaaaaaagcagattgcggcctgtgcttatgaatttattgaagacagagatactattattatagatgatgcatctaccagtttttatctggctgtttatataaaagaacatccggaaaagcacctggcaatagtaacaaattcgctgctggcagccaatgagctttcagggctttctcatgtggaactttttatggtgggcggacacgttggaggtcatcttgcagcaaccatgggagagatcgctgaggacagtatggcaaagttccatgtagacaaggcttttattggtgtccacagcattaattttgatgcaggacttacatccattgccacgcctcagatgcaggtaaagcaggcaattatgaaaacaacggataaagtgtttgtacttgcagacagtacaaaatttggcggaggttatctttcaattatctgccctattaaatctgtgtataaaatcattacagaccagcaagtctcgaagcagaatgtcatacgggcagaaagagaaagtgttccgttggtaattgctaaaaggccggagtagttttcaatgatgtcacaaaaatatatttggtaaagtaacaggttctgctgagaaaagcagcagattttcttgacaagtgaaaagactggtgttatattacatatagaacaaagaggcagggggatgctgcaataacttgccggcatctcctttttgcaggacttgtgaaccggaggtggcataatggcgaaaagagactattatgaggttcttggagtgggcagaaatgctgatgaaaaggaaatcaaaagagcatacagaaaacttgccaagcagtatcatccggatatgaacccgggagataagaaggcagaacagaaatttaaagaaatcacagaggcctataatgttctcagtgacacggaaaagaagaaattatacgatcagtttggattcgctgcatttgaggaaggcttttcggcagaaaatgcagggggattttctgggcgtggaaatggcttcggaggctttgatttcggccgggacggaaacggcgcttatcgggaatatcattttgaaaacggtaacatggatgatatttttggggatatcttcggcgatatgtttcatggtcagggcggacgcaccggaagaggccgggcaggcttcggaagcggtttttccggaaattccggcttccgggggtatcaggacttcggaggcagacagggtacaggacggggcagcgacctgcgctcagaggtcagtgtcagctttaaagaagctgtgttcggatgtgacagaatgctgcagctttctgatccaaatggaaaagcccagaagcttcaggtgcatattccggcaggaattgaggatggaaagagcattcgcctgaaggggaagggaaatcccggatacggaggcggagcatcaggcgatctttttttgaaggttcatgtggaaccggaaaccggatgggagagaaaaggtcaggatatttatacgatagcagaaattccttttatgacagcagtgctgggaggagaagcgaaattttctactttgtacggagatgtgatgtgcaggattccggccggaactcagtgcggcggaaaaatccggctgagaggaaaaggggttccttccatgcagaatccttctgtaaaaggcgaccagtatgtgaccatacagatccaggtgccaaaggcggtaagcagagaggcggcccagaaactgaaagaatacggaatggcaatggacagaagctgttcaggcagacggggaagcgcagtataaagcgcttcctttttggcttctcagtataaagcaaaacatacttttcaaatactggctgtcattttataatagagaaaatgctatgtttgttgtaatgtgacagtgatcagatgtgtttagacttgctttgatgagggatgtatttatgaaactgagtatgtggatgatcgcaaatcgtatctgcgctttggaaccggaactctatattgaagaggatgcgcctatctgtcttagaagtgcacgcatggcctatgcaacagactgtgttcatgtatatcagtcaggagcagacgcagtgtgtcaggggatcggaggaaaaattgttctcagggatatggactgccagcaggcctttgaaatcattcagagtgtttttgatatttatgatgactggatcagcggtttgctgccggttgcagggacagaggattatcagaggatcgtagatgaaagccggcagatttttcagaatcctgttatattcctggatggggacaacagagttcttgctctcagctcccagtatggggaaaaggacattgacagggagtgggagcatctgtgcagatacggctacagttccctgggctatattcagaagttccgcagaacatattcgcagaatgatttttatattaaaaataaggcgcagctgttttctttcggaccggagctggataactgtgttactatgtcagtggcagtttattatgataatctgttttgcgggagaatcaatgttctggaaacagaccggaagctgaatctgggagacatacagattctggaaatccttgccagtcatttgtctccgtatcttggagctatgcgttaccggcaaaatcaggattttcatcagaatatttttcaggatcttctgcgaaagcagaatattcctgctacggtactggaagagcggctgcactggcagctgggatatatgaaatggaagccggaagatttattctgtcttttgacgcttcatccggaaagaaaagatttttcaccggatcttctgattctggccgggaatcagcttcggaagctttttccccagaccagtgtctttactatggaagatcatattgttatggtctgtgatcaggaaaaaaatgcaatggagaatctgtttgctgttttacgcgagtatctgctggtgaatcattttgctgcgggaataagcctgcctttcagacgcctggaaaagctcagatattaccatcagcaggctctggcagcagtttcttatgggcagagagaaaacagaaaatcctctgtctgtgatttttatgattatgcgctttcttatattattgagatttcagatcaggaggcgcttatctgcgcctgtcatccggatattctggcgcttgcggaagaagactcaaaaaatcacggagacaggctgaatacgttgtgtacttatctgaatatggaacgttctctgctgaacacagcaaaagctctttatattcatcgtaatactttagtgtaccgtattacgaaaattattgattcacttcattatgatatagaagatgtgtactgcagagattatatgaagatgaccttccgtattctgaagcttttttcaaggctataatctggaatacagttcaagactgtaattgtatacctcttcttcaaagacgcggaatatgcgttcatcgttgcaggaggtgctgaagacaactccgcttccgtcattggcctgtgcgccgtattcgtctacaaagcttcgcgcataggctctgatctcatcatctgttttgtccagatcattcataatataaggatctgctttcagttctacagttacacggctgccgtattttttcagaattcctttaatgtcgttgatcggctggatttccagtgcatcggcctccagtccttctacgatataaggaataaaacggtcgattttgccgcagttgtggaactggacaagaactcccttgtcatggatggcatcaaatatttttttagtaggctcaaagagcagatcttttaatacatcttctgagaaaaaagcatctctggctgtaccccagtcatcattgtaaataacgtaatcgaaatgataacgttcatacatccgttcaaaaatttcaattttataatctgccattttcataaaaaaagctttgctggcttccggttccgtgagaagatcaatcagcgcggtttcaaaatccaggaaaatatgcattctctcaaacagaccgtttccgtaaggggttgccagagcaagctggggcttccgcacaaaggtgtctaaaccggcatcccagtcgcaggcattcatatccggccactttattttttcttcccactgggtaatgtcatcaagcattcccggcacaggagtaggggtgccaaaagcttccgaaaaagtatactggacaccgaaccagtcatctgtggcagaggtcatactgcggggcatatcctgatttgcaggacagagagcaaactgggtagatctgtattggtgaggcatccaagccggtttttcgtgccggaaagccttcagaagattttcacgctgactaatgggatagccgggatcaaacgggggcatgggcttggacagcgcaggtattttaatatcagacagcttcatatgagattcctcctgttcattgtttatttatctttctgccggacagtgcaatacagaggattccgattacagacccagataaaatactgacgcaggcgatctgccagtcagctcttgctgcggtgatatgcaggatatcccgcacaaacttcagaatataggcagaggaaaactgaccgattcccgtacagcatacgtagatggagattgccatgggagtatggctcttatctgttacgccggaggctgcttttaaggtcagtgccggattggtaaatccgaagcccaggccaaagactgcagcagatacaaaaaataaaggtttgctggaagctgccatcgctatgccgaaggcgattcccaccagaagaatagcgatagccggcgtgtactgtctgcctattttggcaaatcccacataaaccagaccggcaaggaaggaaaaagcagtaaacgtacttaatacattggctgcatctatggcagtcccgatctgttctcctgtgataaataaagccatattctgcatataggaaaactgcactgcatttagcagaaatcccacggcacagcagatatataaggtttttgtatatttggaaccctgtgttttagcagtttcagcggttttctggactcctgtgtccggaagaacaaaaagaaccagaataacaatcggaatcacaagaaggaaaccaaggaaagaaaatctccagctgtaagctgccaggataccgcccagggactggaatactactcctgccagggcgcctactgcgcttttccagcccatcatggcatccttttcacttccgtcaaaaagatctgtaacaacagcagaggccagcgggaacacaagaccgtaaccggctccgaagactacgcgggtaaaaaggataaaattcatatctccgaaaaaggccggaagaacaccggcaaaaatcagaccggaagcaatcagaatggcctttttaatagatactttgcgggtaagccatccggataccagggaaaaaatacacagcatcagcgagtggatagagccgatcagcttcacagtttctccactggcatcaggaaaggcttttgctatctcagccaatgcaggtgtagtcatactggtagtatacattaacagagctacggataaggtggcagcctttaccatgactccgtattttttgtttgtctgttcagtcatagcttttacttctcctccgtttctccacagtacagtttacggctggtaacgtagatcacttcattgatatcaaccttgcgtccgggatttgtattgactacccatggcatatatcgtcctgcttcagccattgtttttacgtgatttcccacatattgccgcagttcttccccgtccatttctgccggaggctggaaaatacttacctgtcccatgcggctggttgtctgcttcaacaatgctgttttgtcgttgcagttatcctgtccttcccagaaatcaaagcctgcgtcacagaaattttccatctgatttcctacacagccgcaggaatgcaggatcatatataagcccatatcgtgggctgcctgattcatccgtttgtaatgaggaagcagaacttcacggaaggtggcaggagacataaaggaattgatctgagtacccatatcgtcgtggaaggtgatcgcgtcagcgtgatatacttctcgggcgattttaaacagttcaatgtgaaaatccgtcagcttttcaaagaaatctccgacagcttccggttcttccagaagataacagaaggtgtcctcaaagctggtcagatcagccagtctctcaaaacagccgttgacaataatgaaggtagtggcgcggtccggttccatcaaatcggcatagtgttcctgataatcttttttccagtcaatggctttcagatcagggaaaatcagctccttttcccagttcacaatgtctgagagtcttcttgtacccggtttcaccatggctgcccggctcagttcttcatattgccattcaatgccgaaccagtcagttccaccgtaggttctggcataggcatccggcatgaccattggctgcagacagttaaaatcaacagaaaaattaggcatccacaaaggcttttctccacgggccagccgtaggaaattttcttttggcgtaataggagtattgaattttcgtactgggaaagacggcacaccgtaaggctttggtacagggcggaattttcccacatcttttaattcctcttcaggacaaaacggatagttcatattggcatctcccttctctttgtttgtatccagtgtacgcctttcgctgaaaaaaagaatcgtgtgcaggatacaaaaacaaacggaataaatgcctgctttttggattttgcatacaaaagatttttgggataccttgataacagaaatgaaatcgcttataatttggcaaagaggtgatgtgtttggaagaatttcggaaggaacctgcaacgcttacattgatcattataaatattgtagtgtttcttatggtggaatttacgggactttcccaggatacgcttcatatgctggactggggagcagcctatacgccgctgatcgtagaaaaaggggaagtttatcgtctgtttaccagtatgtttcttcattttgggattgaacatctgatcaataatatgctggtactttttgttctgggaagccgtctggaaagagtgatcggaaagctgcgttttatcgtgatttatctggctggaggcatgacgggaagtgtactttctcttgtctgggatttaagacagggggaatatgcagtatcggcaggagcctccggcgcagtttttgcggtaatgggagctatgatttatgtggtgatacgaaataaaggacgcctggaggatctgtctgtgcgtcagattcttgttatggccgtcttttctctgtattttggattcgccagcagcggcgtggataacgccgcgcatacagggggacttgcagcaggctttctgctggcggttttttgttatcacaggcggaaaaagatctgaaattcagtgcctttacccggtacgcttcgaaccttcagactgcctccgtgcgcctcaatgatctggcgggtgacaggaagcccaagtcccgttcctgtgggcttgtaggtaacgaagggattgaatacattttttatctggctgtctgtcattccgcatccgttgtcacggacggaaatacagatgccgtcagtaacagcggctgccgtaacagagataacgccgtgagagtgctgaatggattcctgggcatttctgagaaggttcagaagcgcctgatggatttttgtctggtccagacaaagaaggggaagggtctggggaatatctgtttccagagtgatcccaaggtagtccagcgcagggcggaaagagcggataatactttttaaaaggagggtaatatctgtctgtacaggggaaagatgctctgcgttgttgtaacgggacagttcattcagcagctcccggatatattccagattttccatgataccgtaccagccgtcataagaattcagttccggatgagcggaagcgagcatctggagttcactctgaatcaatgctaccggattacgtatttcatgggtaaattttgataaagtcatttgcagctcttttttctgctgttctaaagttaaattttcctgcataatctgtcacctcgtttgcagtgtaccattccggcctgtttcgggcaagaaatttcatgttgaaaaaatcgacaaagtacgagagaatagaagaaacaatatttcataattcaaaggaggagtatattatggaaaactgtattttttgtaaaattgcaaatggtgaaattccctctgcaacgttgtatgaggatgaagaatttcgagtgatcctcgatctgggtccggcaagtaaaggacacgctctgattctgccaaaagttcatgcggcaaatatttatgagcttccggatgcaacagcaggaaaagccatgatcctggcaaagcatatggcagagaaactgacaaatgcactggaatgtgacggatttaatattgtgcagaacaatggagagatcgcaggacagacagtatttcactttcatatgcatttgatcccgagatatcagggagacggtgtagagcttacctggaagccgggcagcctcactgatgaggacagagacgatattctggcaaaactgaaataggaatcaggtattgtacaaaagatgaaaaacgaggattttaatgatatttataggaaataccatagattctctgtaaaaagcgcttacaggcttgtaaaggacagaatgctggcagaagatatcagtcaggaagtgttttatcatctctatgagattatggatactctggatctcggtaatgaagaaaaactgagagcgctgatatttatagcaactgtcaataaaacaaaagattattttaagaaaccatggaaaaggcaggaacatgttgctctggaggactggaaacgcagaaagccttctgaggagaaactgaatcctgaaaagatcatgctgaaccgggaagagatcgagtacagaaaacaggtgctgctcaaacttcgcaaggtaaatcctgtaaattataatattctggttatggtgaaatattttgggatttctccggattctgtggcagaggagtacggtatcacaagaaacaatgtgaataaccgtatcctccggacaagaaaatggatgaaagcagagcttgaaaagctgcacaaaagacattaaacaattattggactatctggatcctgcacattcttcaatcatggaaacgatatggtgaatggaatccatctggctgcctgccgacattgcctgttcatatttatgacggtcggcatacagatttcggatcactgacagaagcttttcgtcagtgatctcttcctcttcaagaaccatactgtagccctgacgttcaaaggaacgggcgttaagaatctgatcgcctctgctggcattggcggaaagcggaatcagaaggtttggcttatgaagagcgctgatctcgcagatggcattggctccggctctggaaattacaatatcagccagggcaaaaagatcagaaagctcttttttgatatattcaaactggacatatccttctgttcctttcagtgattcgtctgttttgccttttccgcagaggtggatcacctggaattccttcagaagctcaggaagaatgctgcggatgtgttcatttactgacgcggctccaagacttcctccgatcaccatcagcacaggtttatcggaagtaaaaccgcagaaaaggcgtccggcttctttatctccgctgagaagctctttgcggataggagttccggtaagaactgctttttcctgaggaagactttttactgtttccgggaaattacagcatatttttgaggcggaagaaagacagagcttattggcaagtccgggagtcatatcggattcgtggatgatcgccgggattttgcgcttctttgcagcgatcacaacaggaacagtcacaaagccgcctttggaaaataccacgtccggtttcagctgtttcagcagttttttcgcctcatgaaagccctttaatacacggaagggatctgtgaaattttttacatcaaagtaacgtcttaattttccggaagaaataccgtaatagggaataccaagctcttcgatcagctttttttcgattccgtcataggaaccaatataggaaatctggtatccggcttctttgagagcaggaataagagcaatgtttggagtgacatgtccggcagtacctccgccggtaagtacaatatgtttcataggggattcctcctgaataaatctttttgttaccaataaatatgaaccaatgggaaagaattgtcaagaacacaaaattttattgcagaaggcaatccagaatgaaattcagccggttagagggaacggtagagataatgaagatcatccggttaccgggaacggcagagagaacgaagatcatccggttagaggaaacagaagagagaacgaagatcatccggttagaggaaacagaagagagaacgaagatcatccggttagagggaacagaagagagaatgaataccagctggttagaggaaacagaagagagaatgaaaatcagtcgattatcggggacagcatagagaatgaagcccatccggttagcgggagcagtaacagagacaaaattccgttggtttctgaaaatagtcatggggcagttcagagaaattatggagagcaggaaaatcaatacaaatgtctgagaatacagcactgggagaaaaccatggaaaataaagataaaaggaatggaaaacaacagaataatcaggcatcagacagagaaaaaagggtatttttagatgagcagtatgtgaaaacagctgcgcagatggaacgggaactttttgcagacaaagattttgaagactatgagcctgaggacagtgaagcagaagcccgttcatatgaaaaactggtcaacagactgaggaaagagggggtatacagagaagagtttgcggatatggcagagtttccaggtatagaaaaggcggatgcagaagaagctccgggaacaaaagaagccatggacgaagaagatataaaagctccacaggttccttcttccggcagaaaaaaatatgccaggatacatgtgggaaaagtggctggtgttgctcttctgtgctgcgcctgtttatttgctgccagtatgacaagccaggcaaacagaaattatctggtgaacaatatacgtgtgtggagcggaaatgatacaaagactgtagttgacaacagtgagcagaatgaaaaagtagatacggcagagtatgaagctgtggaagaaattgagaaacagctgggagtagaaatgccggaattttattacagaccaaatggatttgagtttgtgagttatgagatagatacgacagtagatgttgcccggattgaatatcaatatgaagataatattattatgtttgtgattgacagacaggattccaatactgcaagcaggattaccagtgttggagaaacaaaaacggtagatattgtttatggaacagaagatcaagagatagttctagaaaaaattcagggaaaacatgataaaaaacctagttattctgctcaatggaagatgaacgatattgtgtattatatatctggaaaaatagaagaacaggaattaagaaaaatattagaacaaatgaaattttagagtgatttttaaaaagttttgtcgtattacttatgtaagggttggttgcagaggaaaggagggataacaatcagtagatggaaacagatgctggggattggtttggtggctggaatccttgcactgggaaatgtgacaatggtttctgctcaaccgctcagtattatggatgaggtagaaacgacagcagattatgcggaagataccagttacagcctgcttcgtggaaatcatctgaatctgggaacagtaaaggttcagaggatatccagtaatgaaattggtatttatggcgtgactcagtgtcatcatacctgcgacaaggtatatttatccttgtaccttgagcgtaaggtaaacggaagttacggtacttacaagtactgggaatttactgcagatgatgctacaagcctcagccgaggattaaatgttgcagttcccagcggtacttattatcgtgtgcgcggctatcatgctgccaaggatggaactattaaagagtcaacatctacgcttacaagcggaatattaattaagtaatcatgcggattttcggggtataagggacgatactcctgggaagaaacaaatttttggacatacaaaacgaaaaactgaatagcggagcatgggtgcagactgcaggatgtacagaaaaaagaactgtcaaccgccattaccatcaggcagcgcgaaatgctcgcattagtaactggtaaacaatgagattacgacaaaacatttgttagacgtgtaaaaaataactcgtcaacgaatacgacaaacctttgagggcagggcaggatctgagtattctgtcctgtcttctttttgaaaaacaactgttaaaatcacggagaatcgtgtataataattataaaatattccaatttaataaagattgtctgacaaagggggcttgcatatgaagattacatttatcggtgcaacgcacgaagtgacaggaagctgctactatctggaagcagcgggaaaaaagtttctggtagactgtggtatggagcaggggccggattattatgaaaacagggatattccgggaaatcctgctgatattgattttgtgttgctgacccatgctcatatggatcattccggtaatcttcctgcaatttatgccaaaggctttcagggaccggtttatgccacagatgccacctgcaatctttgcgacattatgcttcgcgacagcgctcatatacagatgtttgaggctgagtggagaaaccgtaagggacgccgccagggcaagccggaatttattcccgcgtatactatggaagatgcaatgggagtgatccggaattttgtttcctgtccttatgaaaaaacagtgaagcctgcagagggaattgaggtacggtttgtagatgcggggcatcttctgggatcggcaagtattgagattacgatcacagaaggggacacaaagaaaaaaattgttttttccggggatattggaaatacaaatcaaccgttgatcaaagatcctacctggcttcacgaggcagattatgtagtcatggaatccacttatggtgacagaagccatggagacagaccggactatgtaggtcttctcagtgaggttattcagagaacctttgacaggggaggaaatctggtgattccttcttttgctgtaggacgtacacaggaaatgctgtattttatccggcagatcaaagaagagggaagagtgaagggccacgggaactttaaggtatatgtggacagcccgctggcaaacgaagcaacaacgatctttggggaacacagatatgactgttttgatgaggaggccgttgccctgaccagaaagggaattaaccctttaagctttccggggctgaaaacttctgttaccagtgatgattcccgggcaatcaactttgacgaggactgcaaggtgatcatatccgcaagcggaatgtgcgacgccggccgtatcaagcatcatctgaagcataatctatggaataaaaagaatacgattctttttgtgggatatcaggcagtgggaacactgggaagagctcttctggaaggagcaacagaggtgaagctgtttggagaggaaatccatgtggaggcagaaatctgtcagatgccgggaatcagtggtcatgcagatgtgaacggtcttcttgactggatcggagcctttgaaggcaaacctcagaaggtatttgtaactcacggagacgatacggttacggaactttttgccgacaggctcagggaagaaaaaggactggatgcagtggcgcctttcagcggaacagtttatgatctgaaggataatgtatgcatttatgagacaacgggagtgaagcttgaaagaatacacatttcctccagaagcagtaaagcggccagagcctttgaaaaactggttgcaatgggtcagaggcttctgtctgttattaaaaagaatgagggatgtccaaataaagatttggatcgttttgccagagaaattcagtccctttgtgataaatgggacagaaaagacggataacagaaaaacggctgcggaatcctgatgggattctgcagccgcttttatcttctgttgtaaataaatcaggccagagcttcttttaaagcttttgataactgatccgggcaggatgtaggacgtacaccgcagcggattccctcaaggcggcggatcgcttcctctgcctccatgccttctacaagacgggcaacgccctgagtatttccggagcagccgccctggaattttacattgtgtatttttttctggtcgtccagctcaaattcaatggcgctggagcatacgccgcttgttttgtatctcatttgttttcctcctgatgtaattggattttaagtactgttcatttggaaatatcacgcctgatgtaatccggcatgcagatgtgaacagtaacagttttctgtaacacattatagcagaatttaaaaaaagtttccatataaacgaaacttttgttataatgtatcatgaataagcagatgacggcttacagccgcgtcctgccaggtattctggtatatatccaaataccggaatatacagatcaaaatgccattgccgatgattcggaatgcattttgcctaaactgataaaacagattacagaccataagacaggagaattttgttatgagatgtattggaattataggagcaatgagcgatgaggttgcaggactgaaggctcttatgcaggatacacagattataagaaaggcttccatggagttctactcaggaatcctggaaggaaaaaaagtagttgttgtacagtccggcatcggaaaagttaatgcagctgtctgtacacagatcctgatcgatgactttcaggcagaggttgtgatcaacacaggaattgcaggaagtctgaataatgatattaatattggagacattgtagtttctaccgatctggttcatcatgatgtggatgcaggcgcttttggatataaaaaaggacaggttccggatatggacgtattttcttttggaagcgacgacgctcttcgcagtctggcagtaaaggtgtgcagagaggtaaatccggatattcaggtatttgagggaagaattgcttccggagatcagtttgtggcagatcagggagtaaaggacgttattgtcagcgaatttggcgcttatgcagttgaaatggaaggcgctgctatcgcacatgccgcatatctgaaccatgtgccgtgtctggtggtccgcgcgatttctgacaaggcagacggaagtgcggaagtagattatcctgcttttgagaagctggcgattgagcacagcatgaagcttaccagaagaatactgagagagatgcaggcataaaaagtcacatctgagcttttgtcgcatagtttaaagaagaagtctggaataagcaggagcctgtctatgtattatgatgaattttttccgttttacgcagcatatgcagatcctttactttatgaaagagaaaatatacaggaaaaggaatttgcgctgatgaaatcctggtatccggaaagtgtccgcaggctgcaggaaagggtggaacaggaatgtcagcttctggattatgaaggaagccgtatttatgacgagtatccggatcgatggatgctgcgccggatgtgcagggatatcagggaaacagaagaaaatacaatggaggctcagatggtgtcttcggaaaagctggaagaactgacagaggtgcttctgtaccaggagatatccagaagacgatgcagaaggcgaagatgccgcggatactgaaacaggcaggacagaacgcctgaataaaggcgagaaagagttatacagaaatgatgaaaacattacaggaatttttggaggagcagatcagtgaggagctgatccttgccgtactcagcggcagcagaaaaaaggaaattccctcaagagtgagaatacgtccggtggagctgaagggcaggatcctgtatcaggcctcatccacagtggggacaaaggttcttcacgaaaattataccagaaaagagcttcttgcctatatggagcaggctcttgcaggagattattctcagctgcaggtacagggcagcagcgcggacggcagtgttcttgtaagcaaaaaaggaaaacagaccattaaagtgaagccccatgctgtaaaaaagcctgcaaaaatactttcgcacaacagggtaaagcagtatatccttccggaaggaaagccggttccttttctggtggatctgggagttatgagcccggagggaaaggttcatgtttctgcttatgataaatataaacagatcaaccgttttctggaatttatagaggatatccttccccgcctttccagggacagagagattacgattgtggattttggctgcggaaaatcatatctgacctttgccatgtattattttttacgggagctgagagggtatgatgtgaatatcatcgggcttgacctgaaggcagatgtgattgaaaactgcagccgtctggcggaaagctacggatatgacaaactgcatttctgtcagggggatatagccggatatgaaggtctccagaaggtggatatggtagttaccctgcatgcctgcgacaaggcaacggattatgctctggcaaaggctgtggagtgggatgcagaagtgattttttccgtaccctgctgtcagcatgagctgaacagtaagatcagcagcgagcttctggagccggttttaaaatacggtattttaaaagaaaggatgtctgctcttattacagacggaatccgggcaaatcttctggaatccaaaggatattccacacagatcctggaatttattgatatggagcacacacctaagaatctgctgatccgggcagtaaaaagcggaaaagagcagagcacagacaagctgaaaaaaatgacagaggctcttaatggggagcttacgctggagcagcttctttatccccgggataatgagaagggagcggtgtaaaggcagatgaaaaagttttttcgcaagtttgcagtgctccttctggtgtttgtgctgggagtggccggaactgcgtttttgatgaacagccggtcaacagatgaccgttccgatatgaataatccggttcttccggaggttatgactgagttcggaggaactctttccaatctgatgcatggatacagacagcccatgcaggctgattttgtcagggaatgcattacgccccttgataccacccgtacggtatctctggcagtggatccccatgaatcagaggtaaaaagcctttcctatgagatcagaagctcagacggaacaaaggtgatcgaaaacagaaagatcagcgccctggaatcttccggagacgggtatctcagaacttcagtacagatcagcgcaggtcttctgatgaatcaggaatattccatgcagattaccctggatacagattcaggcgaggcttactattatacgagggtagtttccaggacggcaaccaatgttgcggactatgtggcttttgcatcatcctttgcccagaagtgcatggataagactactgcagatgaactggggacatacctggaagcaactgaaacatcagcccgcaattttgcagatatttccattacttcatccctggcaaatgtaagctgggggaatttacatcctcagatatccagagcagggattccggtgatcaaggatattaatgagaccactgccagtatttctctggaatatgagatcatggctgccaatgatgaaggaaaagcagaatattataatgtgacagatttttacagaatgcgttatacggaaacacgtattatgcttcttgattttacaagatctgcccatcagatctataatccggagctttctgtgatcagcgataaaggcctgcttcttggagttggagataagaatgtctcctacatggcaaacaaagacgcttcggtagtggcctttgtccgggaaggcgagctgtggacctatgcgccggaaagcgggaaatttgtggacgtattcagctttcgcagaaatgttgacagcgattccagagatgcagatatgaaccatgacatcaagcttcttggcatagaagaaaacggcgacgtggattttatggtttatggatatatgagccgcggaaatcatgaaggatacagcggcgttggtatttatcattataacagcgaccagaacatggtagaggaaaaggtgtttataccaggtacggagtcatatgaatttctcaaggatgatctgggaattctttcttatgtaaacaaggataaccagctgttcctggtaatggcaaaagatctttaccagatcaatattgacgaaagcagttataaggtgctggcagaggggatcaacagagataattttgtggtttccgacaccaatgcccatgcagcctggatcgtgtccgaaggagaaaatgcagggcagatacagatgatggattttgattcccagaaggtaagaatgatcgcaccgggccaggatcaggagttgcgtaccctgggatttatgaacgaagacctgatttacgggcttctccagagcggagatatcctcacagacgaaaacggtcacagcacagaagggctgacctctttccggatcgaggactttgagggcaatttgaaaaaggaatatcaccaggagggaatgtatattgtcaatccttctgtgggccggactctgatggagtttcagcttgctgtaaaaggaaaacagggatattctgtccagaaaaaggacaatatcatgaacaatggaaataaaacggccaagctggtaaccgcagagcagaccagctccgaccgccagggaattatgacccggctgacctttgaggacaaaccggaatcagacaagcctctggttctcagagccaagatgcgcagtgtgaaagagcatattgtggagcttgaggtggaaacaccggaggaagagttgtactatgtatatggaaagggtggtttggacagcacctggacagaccctgcacaggcagtaaagcgcgcggattctcagatgggagttgttctgaaccgggcccagcagtatgtatgggagagaggaaatctgaaaacacagattaccttgaatacagaggatattccggaaattatccggacaggctcctgggataaaaaggttcttcaggacggaatgggagataccggaaaaataatcgacctttccggctgcagtctggaaaatgttctgtatgagatcagcgcccagagagctgtgattgcaaaaacaggagaaaattccagtactgtgatcgtggggtacgatgaatataatacctggcttcttgatccggctaccggagaggtgaagccttatggaatgcaggacagcacaaagctgtttcagaaggcaggaaatatttttattacttatctggaagctgtgacctattgacaggtcatggcattcctgaaaataaattaaaaaagaagaggattcttcagaaacaggaggcagcattatgcagaaagaactgatggaaaaatttgtggaggtttatggcgaaggcggagaaatccgtgagtactttgcgccgggaagagtaaatctgattggagaacatacagattacaatggcggacatgtatttccctgcgctctgactctgggtacatatggactggcccgcaaaagagacgacagaaaactgcgtttttattctgtaaacttctccagacttggcgtgatcgaatcttccctggatgatctgatcccttctgaccaggctggatggacaaactatccgaagggcgttatgtgggcgtttgaaaaaagaaacatcaagctggagcatggtgtggatttcctgatctacggaaatattccaaatggttccgggctttcttcttctgcgtctctggaagttcttacaggtctgatgctgaaggatatgtttggcgttgaggaactttccatgcaggatctggctctgatcggacagtattcagagaacaatttcaatggaatgaactgtggtattatggatcagtttgcaagcgccatgggcaaaaaagactgcgcgatcttccttgatacaagcactctggaatttgaatatgctccggtacagctgaaagacgccagaatcgttattacaaacagtaaggtaaaacacagtctggtgggatctgcctataatgacagaagaaacgaatgtgagacagctcttgaagaacttcagaaagaattggatatcagaactctgggggatctcagcgaggaagagtttgaagctcataaatcagccatcacaagcgacatctgcagaaaacgtgcaaaacatgcagtttatgaaaatcagcgtacaatcaaagcagtaaatgcgctgaaagcagacaatgtggaagagttcggaaaactgatgaatgcttctcatgtttctcttcgtgacgattatgaggtttcctgtgaggagatcgatattctggtagacctggcatggcagattccgggagtgatcggttcccgtattacaggaggcggtttcggcggctgcacagtaagtattgtgaaaaatgacgcagtggatcattttattgataccatcggaaaacagtacaaagaaaaagtaggacatgaagcagagttttatgtagtagacatcggtgacggagctcatgtgatcgcataaaatcagggggataaaaacatgttaagtaaaagcatcagaaaactggtacagtatggaattgagacaggactgacacctgaatgtgaaaaaaattatacaatcaatctcctcctggatgtctttcgtgaagaggaatatgcagaaccggaagaagtaccggaaaatgtgaatctggaggaaactctgggagagcttctggatgaggctgtgaaacgtggactgatcgaggatagtgttgtataccgtgatctttttgatacacgccttatgaactgtctgatgccaagacctgctcaggttcagaaagaattctgggacagatatcagaacagccctcaggaggctacggattatttttacaaattaagccaggacagcgattatatccgtcgctatcgtgtaaaaaaagaccagaaatggacagtggaaagtccttatggagatattgatattacaatcaatctgtcaaaaccggaaaaggatccaaaggccattgcagcagcaaaaaatgcaaaggcaagcagttaccccaaatgtcttctctgtcctgaaaatgaaggctacgcaggccgtgtgaaccatccggcaagggaaaaccacaggatcattcctattacagtaaacgacagcccgtggggcttccagtattcaccgtatgtatattacaatgagcactgtattgtatttaacagtcagcatactcctatgaagattgagagaaatacctttatcaagctttttgactttgtaaagctgtttcctcattatttccttggctccaatgcggatcttcccattgtaggcggttctattttaagccacgatcatttccagggaggccattatacctttgccatggcaaaagcccccattgagaaaaacgtagtgattccgggatatgaagatgtggaggcgggaattgtaaaatggccgttgtctgttcttcgaatccgtcataaggatgaaaaacgtctgatcgatcttgcttctcatattctggaggtatggagaggatatacagatgaggaagcctttgtgtttgcggaaacagagggagaacctcataataccattacgcccattgcccgtaaaagagatgatctgtttgagcttgatctgacgctgagaaataatattactacagaggaaaatcctctgggcgtatatcatcctcatgcagagtaccaccacatcaaaaaagaaaatatcggtctcattgaggttatgggccttgcagtactgccggcgcgtctgaaagaagagctggagcttctggaagagtacattctggaaggaaaagacatttcctccaatgaaaagattgaaaaacatgcctcatgggtacagcagttccttccaaaatataaggatctgaacagagacaatatccatgagatccttcagaaggaagttggaaatgtgtttgttcatgtactggaggatgccggcgtttataaatgcacagaggaaggcagatccgcctttatgcgttttgtagaaaaactctgatattttctgaggcaggagttccgttcccgggaaccgggcggatttccgtaaaactcctgcatttacaccttgcaggaacacagtgaatgggatatactagaaagcgaaacggatgtttgtacatctgcttcgctttttatatcatgagttatcattaaacagagagaggaaatagattatgaaacttacaactgtaaaagaaatttacacagaccgggaaacctttctggatcaggaagtgaccgtaggcggctgggtacgcagcgtccgtggctccaaggcatttggatttattgtacttcatgacggttcctgttttgatacacttcaggtagtctatcatgataccatggataattttgcggagatcagcaagctcaatgtaggagctgccattattgtaaagggaactctggttgcaacaccggaggctaaacagccttttgagatccaggcatcagaagtacaggtggagggagcgtctgcgcctgattatcctcttcagaagaaacgccacaccatggaatacctgagaacaatgacacatttaagaccaaggacaaataccttccaggcagtgttccgtgtccgttctctctgtgcatatgcaatccataaatttttccaggagagaggctttgtatatgtccatacacctctgatcacaggaagcgactgtgagggagcaggagaaatgttccgtgttaccactctggatcctcagaatccgcctgtagatgacaacggaaaggttgattacactcaggatttctttggaaaagaaacaaaccttacagtaagcggacagctgaacggtgaaacctatgctcaggcattccgcaacatttatacttttggacctactttccgtgcagaaaactccaacaccacccgtcatgcggctgaattctggatgatcgagccggagtgtgcgtttgcagacctgaatgataacatggatcttgctgaggatatgctgaaatatgtgatccgctatgtgctggagaacgctcctcaggagatgaatttctttaattcctttgtagataaaggacttctggaccgcctgaaccatgtgatcgattctgagttcggacatgtaacctatacagaggcgatcgagcttctggaaaagaacaatgacaaatttgactacaaggtattctggggctgcgaccttcagacagagcatgagcgttatctgacagagcagatctttaagaaacctgtatttgtaacagattatccgaaggagatcaaggctttctacatgaaacagaatgaggatggaaaaaccgttgctgctatggactgccttgttccgggaatcggagagatcattggcggaagccagagagaggacgattacgataagctgaaagcccgcatggatgagcttggtctgaaagcagaggactatcagttctacatggatctgcgtaaatacggatctacccgtcattccggttttggactgggatttgagcgctgcgttatgtatctgacaggaatgggcaatatccgcgacgtaattcctttcccgagaacagtaaacaactgcgatttataaggagtcataaatgataagatttattcatcttgcagatgttcatctgggggcggttcccgacaggggctgcccgtggagccatgagcgggaggaagagatctgggaaactttccgccgggtcattgcgtctgtacgcagggatccggtggatttgttatttatagcaggagatctttttcaccggcagccccttctgaaggagctgaaagaggttaattatcttttttccaccataccggaaaccagagtgttcctgatggcaggcaatcatgactatatgaagagaaattctttttacaggggatttgcatgggaacctaatgtgacatttttcgatagtgagaaaatgagctgcgcatatattgaagagcttcagacttttgtttacggaatgagttatgagcatcaggagataaaagaacctctgtatgacagctggcagccggagcaggaacagggctttcatgtgcttcttgctcacggcggcgatgagaagcatattcccatggatgcaaaaaaaattctttcctcaggctttacttatctggctcttgggcacattcataagcctcaggcaatggtaaggggaaaagccctgtatcccggagctctggaacccattgaccgaaacgatacaggagatcacggttatattgagggaagctatgacaatggcagaatgcgtctgaaatttgttccttttgcatccagaagctatcagaatcttcttcttaccctggatgagacctccactcagtattctctggaggagatgctgaagggagagatcctgaaacggggcggaaaaaatatttacagactgattctcaggggaagacgcgctcctgaatttattcttcttacagaacggctgaaaaagctgggaaatattgtggaggttctggatgaatccagacctgcttatgatctggaagagctgtacagaaagtatacaggaaccctgatcggagactatattggatattttatgggaagagagctgactgtggtggaggaaaaggccttgtatcacgggctccaggcattgctggaaaccagcatactgaattaacggcgggaaagaattatgatcataaaacgaattacagtcaggaattttgggaagcttcaggacaggaccatggagttttcagatggaatcaatgtgctgtacggcgacaacgaaagcggaaagactactacgcatacctttgtgagaagtatgctgtatggaatccagagacagagaggccgcgctgcccgtaaggatgcttacaatctgtatctgccctggaaaaattctgctgattatggcggaactttgtggtttgaaaacggtggaaagaatttccggcttacgagaaacttttataaggagaaccctacaacagaatttctctgtgaggatgacggagagatcctggatgtggcccagggagatctggatgctgtgcttggcggcatcagtgagacggtttatgaaaacacagtttcagtggctcagctgaaaagcaccacaggcccggagctggtgagagaagtccagaactatatggcaagctaccagggagccggagacagctccgtagatctgggacggaccatgcagatgctgaaaatggccagaaaaggctatcaggtacaggcagaacagaaaaaaagagaaaaccagagggaaaaggaaaaaatttcctccggaatggagtatatcagacaagagattgaagaactgcaggaaaaagaagccagagtttccggacaggaaaaaagcttttatataggcggcgacggaagcgggatcggtgatctggaaacggggatcgcagcgctttacaggaagcggaaaattctggagtttgtgataacggcagctcttatattcggaatcggcggagctctggcagtagccggaatcacaaaaagcctgattactgccatggtcattggtgtgatcggcattgcggcaggagtcggcgcctatcttgtgagaatgcgtgtatctgaggaaacagaaaaaaaagaatggcagaaaaaccgccttcttgcaagacaggagaagctttcctggagccgggaaaatatcagagaagcccggaaggaaaaggaaacggccctggaaaacgctgcggcagaatacagagaggctgaagagtacgtttattttcctcttgcagaagaaatggaaatagaatctctgaatctggctatgacagtgatcgatcagatttcaagggatattcaccgacaggtgggaggaaagctcagaagacggatctccggaatcctttctgagatcacaggaggcaggtatacggaaattcttatggacgcagatctccatatgacagtaaataccggagagcgtaccgtgcctctggaaagcctcagcagaggaactgtggagcagatctacttttccctgagaatggcggcaggagagcttctgtgcggcagagagcagcttcccgtgtttctggatgaggtatttggcatgtatgatgaggaacgccttacctctgtgctgaaatggctggcaaaagagaaacgtcaggtgatcatctgcagctgcaggcagagagaaatggaaattctggaaaagaatggaattgcctataataaaatagcgctgtaaatgaatacgggaaaagccctctggcagtcacaggactgtgcagggggcttttctgcggtgtcagtttattgctttcaggcgcctgatgtgagccttctgaaaattatttatactgatccatatagttgcttacacagcgtttgatacggtctaccggattcagaaggtggctgacagacatatcatggttcagagtgtcgatgataagagcaatatatttactcatatcacaggtaatataatatgatttttcaagaagctccggtgtctggtatacaaggttggtagtaagaagcttgtcaaatacgccgtttttgaagccttcgtcaaatttgtccagaccatctgtaaacagaccgaaagtagagcagatatagattcgtcctgctcctctctttttaagaagagaagcgatcttgagaacagtgtctccggaggagatcatatcgtcgatcaggatcatatccttgccttccagcttcggtcccaggaattcataggcagcgatcggatgacgtccgtttacacgtctggaataatcgagacgcttatagtacatacccatatcaacaccaaggatattggcaagataaatggcgcggttcatgcttccctcgtcagggctgatgatagcaaaatgttcattgtcaatgcgaagaccttcttcgtttctgagaagagccttgataaactgataggatggctgaacagtttcaaaaccatgaagaggagttgcgttctgaacacgggcgtcatgggcgtcaaaggtaatgatgttttccacacccattccggtcagctcctgaagagctgtggcgcagtccagtgattcacgtcctacacgtttgttctggcggctctcataaagataaggcatgataacattgactcttcttgctttgccgccgattgctccgatcacacgcttcagatcctggaaatggtcgtcaggggacatcaggttggtgaagccgctgatacggtaggtcatgctgtaattgcatacatctaccataagataaatgtcatcgccgcggacagactctgtgatcacggattttccttctccggaaccaaaacggggagtctgtactccgaggatgtaggaatctctctgataaccttcaaaagcaaaggaattaagctcctgatgatttctttcctgtctccattttacaagccagtcattgaccttggagccaagggactgacagctttccagagggatcagcccaagtcttcctacagggagtgttgtgagatctttggtgcttaactgtgccattctttattttcctcctaaaaatattttctgtatgcggatatcttttccaatgagtttcagcatctgaaaattgcttgcgatccgggaaaaggttctctcggaataggtggcagaaaaatcctccagcttcagattggtagagatgatggtggattttctgcgggcaagccgctcattgatgcacaaaaaaagctgagaagatacaaagctgttggtaagctctgtaccaaggtcgtcaatgatcagaagatcacagtcgtaaataaaatcttctcccggatccgtttctgtctttctggcaaaagtattctgcgccagtttatcaaaaagatcaaaagctgaaaaataaagcacgcagtgagcggttttcagcaattcacgggcaatgcagtgggagaggaaggttttgcctactccggtgctgccgtacagaaaaagattctggcagccggaatcaaaattgcgtacaaaattcacagcagtatcataggcatgctttgctgtttctcttgcggtcagtccggttgcctcgttttttattgtatcagaataccagtcaaaagaaaagtgctcaaaattttctttttccagaatctctgcaagattggactgagtataaagaagttcgatctctgcttttttgaagcaggagcatttgcctgtgtccgtgtagcctgtatcctggcagcggggacagaggtaatgaggttccagataatcttcaggaaagccgttttctttcagcagagaacggcgctcacgggacagcagagctacggatcttttcagatcttccacagagctgctttgaccgcagagcagagaacgtgccttctgggcgctgagagaagcgacctcacggtcgatctctgccagccggggagcctttgcaaaggcgcaggagcgtcgtttttccaggtcgtgcataacctgagtctgtctccggttgtattctctcataataatatcatactgaaaattctgtaaagacacgtcatccctccttgcctgaaaattactggttcagcaggcgtttttcatattcgtcaaaattatattctctctgctgaaaattattaaagcggttgccggaagcaggagcggcaggtttggactgttttttgtcctgcttccgtttcttgtgctctgcgtccagagcctggatatcctccagagtttttacctgtttctttttccagccctccaggatcttgtccgtatactggaagctggcctgtcctgtctgcagaactgttctggtgcaggcttcctgaatgatggcaatagaaaaaccataagttttcagccaggtgtccatcagagtgatctctgtttccacagggcttctgttggtgattcccagagccttcagaatggaataataatccttgctgtaccgggcattggattttttggcttccgccacagtggagattccctcctgagcccaggcaagggcaacggtctccatgtaccggatgcttttatgactgcggctgacgcagtactcgatcaggtattcgatcagatctgcggaaaagcccaggccgtcatagaagaaaagaatcttctgtatttccgtgggggacagggttttgcccagatactgttctgcaatataaagaagctggataatatcttcgttctgtttcagttcttttacacggtccggcgtaagcggtgcggctttggccggtactgcctgctttaaagcggcggcagccgtctcgtcttcagcagaggcttttgcctttggcagaagcagggcaatgccgcggagacttttatctgcagcgaagtccagggcaagaagctcctgtctggaccagtatttcagcgcccgcagaatatccctttctgtacagagcaggtggtcggccatctgttccaacgtgaaagaaaccggagtagtggacagcgcccgtaaaagataaatgtaaacctttacaaactcaccattggcctccggcatgtagtcatctataaaaatattggacagaagcgtaacctctgactgggagggcttctgcagtgtaatcatgctcatgaacgatctcccgctttctgaatcttttaagtcacctgcattatagcacaagatttttcaaatgagaatagggtattttacggggaaatctttccacataaaaatgtggataatgtggataatgtggacaacgaattttctcgaatatttgccataaatctcggaaaccgcgtgttttgttgctttttcattaaaaatagataaaattgctgtagaagaatgtcggatgatggaggcataaaaaatccacatgtccggcacgggggatatgtgcataaacatgtggataatgtggataacttagtttccgagaagctgttctcctatatttacaacgtctccggcccccatagttatcaacaggtcaccctgtgtacaattttcaagtaaaaaattctcaatttcatcaaaagtcgggaaatattcgcaggaagttccaagttctgcgattttctctttcagatcttctgaagaaattccaagagtatcggtctctcttgccgcgtagatatctgccagaaccacatggtcagccagagaaagggcttttgcaaattcaggaagaagcgccttggtgcgggtgtaggtatgaggctggaacacgcaccagatctttttgtgcggataatttgcagcagcatgaagagttgcctcaatttctgtgggatgatgagcatagtcatcaataatggtcactccgccgatctggcctttatactgaaaacgccggtctgtgcctgtaaagctgttcagcccctctgcgattacttcccaggaaagatctaaaagccgggctgcggcaatggcggaaagtgcattggaaacattatgtactcccggaacacttagggagcaggtgccaagagcctgtcctttatggcatacagtaaaggtggcatggccaagctcgttataggtaatatcagaagctgtataatctgcctcatgctccagactgtaggtaagtacctggcaggacagtccttctgtgattttttcgtactgcggtgtatctgcgttgatgatgagagttccgtcctcaggaagaagctctgcaaatttgcggaaagagcagcggatatcttcaatatccttgaagaaatccagatgatccgcatcaatattcaggataatgctgatcttcgggaaaaagctcagaaagctgtttgtatactcacaggcttcggtcaggaaggtctctgactgtcctacacggatatttcctccgatagccggaagaatgccgcctacgctgatggtaggatcgcagtcacctttcagcagaatgtgggaaagcatggaggtagtggttgttttgccgtgggttcctgctactgcaacaggggtgtcataattgcgcatgatctgtcccagaagctgggctcttgtgagcatgggaagattcagctcctgagcttttctgaattccggattgtccgggtggattgcagcagtgtacacaacagcctgaacggtatcggaaatattggaggcccgctgtccgtagtagatttttgcgcctttttcttccagagttctggtaagagggctttcttttgcgtcagagccggagatagtgaagccttcttcaagaagaacctcagccagtccgctcatactgataccgccgatgccaataaaatgaatagccatcggttttttgaagtctatctgatacatagtattattctcctgttcattcatgaatatgttcctattataaccctatcagccttaaatgaaaagtgtttcttaaagggcagaatgtaattccgaaaggcgatcaggaaggtattttgaccaggctgccggggtgagagagtacaggggaaaaacatgtgcaatagctccaaaaaaatataaataaacagcaaaaatattgtaaaaaatgttcactaataaggggaagtatgatataattaaaaaatcataacatacaaggggtgagtgcatgatgatgaagaaggaaatgattgccatgcttctggctggcggtcagggcagcagacttggtgtgttgacagaaaaggttgcaaaaccggctgtcgcatttggcggaaagtaccgtatcattgattttccgctgagcaactgcatcaattcaggcattgatacagtgggagttctgacacagtatcagccgctgcgtttaaatactcatattggaatcggtattccgtgggatctggacagaaatgaaggcggagtcacagttcttcctccctacgaaaagagtacaagcagtgagtggtatacgggaactgccaatgcgatttttcagaatctggattacatggaacagtataatccggattatgttctgattttatcaggagatcatatttataagatggactatgaggtaatgctggacttccacaaggcaaataaagcagacattaccattgcatgtatgcctgttcctattgaagaggcaagccgtttcgggatcatggtaacagatgaaaccggaagggtaacagaatttgaggaaaaaccggagaagccgagcagcaatcttgcgtctatgggaatttatattttcagctggccggttctcaaggaggctctgatcgctctgaaggatcagaacagctgcgatttcggaaagcatattcttccgtactgtaaggagaaaggtcagagactttttgcctatgagtataatggctactggaaagatgtgggtacgcttggatcttactgggaagccaatatggaactgatcgatattattccggagtttaatctttatgaagaattctggaaaatttatacaaaaggtgatattattccgcctcagtatatttcagcagatgcggtaacagataaatgtctgatcggggaaggtgctgaaatttacggtgaagtacatcattctgtgatcggtcctaatgttgtaattgaaaagggctgtgtgatcagagattctattatcatgcgcaattccgtggtgggtgaaggcactgtaatggacaaggcaattgtggcagaggatgttgtgatcggaaagaatgtaactctcggctgcggagaagaagctcccaatgtgctgaaacctgcggtatatgcctttgggattgccacagtaggcgagcacagtgtgatccctgacaatgtaaaaatcggtaaaaatacatctgtgtccggagtgactgtgccggaggactatccggagggaatactggaaagcggacagaacatcaaggcaaaggacggtgagaaggcatgagagcacttggaattattctggcaggcggaaacaataaccgtatgagggaactttcaaacaaaagagccattgcagccatgcctgtagcgggaagctaccgcgccattgactttgcattaagcaatatggcaaattcccatattcagaaggtggcagtactgactcagtataacgccagatcactgaatgaacatctgagttcctcaaaatggtgggatttcggaagaaagcagggtgggctttttgtgttcacacctactatcacaaaagaaaacagtctgtggtatcagggaacagcggatgctatttatcagaatattacattcctgaaaaacagccatgagccttatgttgttattgcttcaggagatggaatttataaactggattataataaggtgctggaattccacattgccaaaagagctgatattacggttgtgtgtacagagtgcagagatcagagcgaagtagagcggtttggcgtgatccgcatgaatgatgactgcaggattgaggagtttgaggaaaaacctattatttcttcttataatactgtgtctacaggtatttatgtaatacgaagaagacagctgatcgaactgcttgaaagagctgctcaggaagacagacatgattttgtaaacgatattctgatccgttacaagaatctgaaacgaatttatggatataagattgattcctactggagcaatatttccacggcagaagcatattacagaacaaatatggcatttctggagccgggaatccgcaattatttcttcagacaggaaccggcggtaaaaacaaagatcgacgatcttcctccggcaaaatataatgcaggagcttctgtgaaaaacagtcttgttgccagtggctgtatcatcaatggaacagtagaaaattctgttctgtttaagggtgtgtttgtgggcaacaactgtgtgatacgaaattctgtgatcctcaatgacgtatatataggagataatacacacattgagaactgtattgtagaaagccgggatacgatccgggcagactctgattatcgaggagaagacggagtcagaatcgtggtagaaaaaaatgatcgctacgtaatttgataaacggaatttctgatcgcggcttatggggcagtaaaacagatttccagtcagttggcgtatacaaaatgaaaggggcagaaaaagatgaatattacagatgtacgtgtgagaaaagttgcaaaagaaggaaaaatgaaagcagttgtatccattacaattgatgatgagtttgtagtacatgatatcaaagtgatcgagggtgaaaagggactgtttattgcaatgccaagccgtaaagcggcagacggagaataccgtgatattgcacatcctattaattccacaacaagagacagaatacagactctgatccttgacaaatatcaggaggttatgaacgagacggacgcgcaggaagaggcagcagaggaataacaccggatatctgtaataaaaacgaaatgatttagtaaaagagatgttctgaagcagaatttgtcgaaaaaaattactccagaatgtctctttttttgcgtgtatccgccgaaatattacatatttgttacagaaataaaataaaagtattgatttttgaatgaaatgttgttatacttgtcctacgaaaaaaattatgaggtgtttatatgaagatgaagaaagttctttcactgctgttgaccggcgccctgactgtttccatggggacaagcgtttttgcatccacagaagaccagatcgcagccgcacaggcacaaaagcaggaggcacaggcgggacttgctcaggcacaggcaaatatcagcagcctggaaagcaagaaacaggaactggaatcctatatggcagaactggacgcacaatataatgaactgacaaatacaatttcacagctcagtgtggaagcagctgaaaaagaagaagagctgaaaaaggttcagacagagctggaaagggcaaagaaaacagcagagaatcagtatgaggcaatgaagcttcgtattgtttatatgtatgaaaacggcggaaactccatgctggaaacacttctgtcatcagaaagcctggcagattttctgaatcaggcggataatatttcaaaaatttccgagtatgacagaaatatgctgaagcagtatgaggcaacccaggaaaatatccaggtacaggaggaaaaggtagaagaggaatccagctctattaacagtctcctttccgaaaaaagcgccaagcagcaggaagtgcagtctctggttgcaactaccggtgacagcatcaactcctatatcagccagatcagcgcaagccaggaagaggcaaatgttctgatggctcaggtaaacagcgcagacagcagtattgcaactctgatggagcaggctgaacaggaaaaagcagcagctcaggcggctgcacaggcagcggcagagcaggaagccgcttcacaggaaagtgaagaaccggaatatgatccggaaacagacacaaccgattctgaaagcagctctacaagcagtgatgttactgtagaggaggttgctccggaagaggatgcagaagaatatacagaagaatatacggaagagtacacagaggatacggaaacagagccggaagctccgtcagatacagatggaagctctgattcttccggttccagtcagggtacataccttggaaacttcatgctgacagcctactgtaactgcgcgcagtgctgcggaacagcgggaaatgccactgccagcggtgtaatgccttcagcaggtcatacagtagctatggcgggagttccctttggaacacagcttctcatcaacggaactgtttatactgttgaggatctgggaaccccttacggacatgtggatatttattttggaagccatgaagaggcattaagctttgggctgcagtatgcagatgtatatcagctgaactaaaaccatacaggaatatcatgaagagactgccagagatgacggtctcttttattctttacccggaaaacagtacattctgtatcattttcccggtaaataaaagattctttgtgaggattctgagcgtttgagacggacctgtccgcttgttcagggaatattttcatataagagacaaaaaacggaaaaaggagaaagatattaatggagcttgtaagtggaagaccgcagaacacagagggaagactgggaaaagaaatcagaacatatgactttctggattctattgggattcattatgaaagagtggatcataagccggctatgaccatagaggcctgtgaggaggttgacaaaatactgggcgctgtgatctgtaaaaatctttttttgtgcaacagacaggaaacagacttttatctcctgctgatgcccggggataaaaagttcaaaacaaaggatctttcagctcagatcaattcctcaaggctttcttttgcaaagcctgaatatatggaacagtttctggatattactccgggttcagccagtattctggggctgatgaacgacagagataaccgggtacagcttctgatcgacgaggacgtgctgaaaggagaatatataggatgtcatccctgcatcaatacttcaagtctcagaatcagtacaaaagatatgacagaaaaaataataccggaattgaagcataatccaaagctggttcgtttaccttagtatagaggaaaaagtctcagagcagtgctgcgggaatcagtaaaaacgaaatatgaattttttataaaacatggagatttcagcaattttggcattgattaaataagataatacgttatactattatctacagaagaatatacgctgaaaatggttttgaggcggtggaccgcctggcgggaaagggtgataatttggattatctgaggaagtcaaaacatatatggatcatcccggcatatgggattttttatatgatttcttttatgcttgtggaaaaaatcagtacagaaacccatctgattcattcttttgtggatgatctgattccgttttgtgaatactttattattccctatgtgctgtggtttcttgtagttctcggaagcgtcatgtattttgcattgggaagtccgggcaaaaaagagtattatcagtatatggcgaccctgggtgtgggaatgactctgtttcttattatctcctttgtgtatcccaatggccagaatctcagacctgaactgacaggagagggtccttttattcaggctgtgcagcttttgtaccagacagatacccccacaaatatttttccgagtattcatgtatttaatgcagttgcctgttgtgtggctcttctgaataacaaaaaatgcagacagaacaaaatctttacagccggaaatattgtgctgactgtatcaatcgttctttccactatgtttttaaagcagcacagtgtggaagatgtagttaccgctctgatcctcaatgtgatctgttatcagatattttacaggatcattccggaaaatatgcataagtttgagagaatgcttaccagaaaacagatctgtacatcgcctaatctgctgagcgtcggcagacttgcccttgctcttgtatttatggccctgattgagcggtacagactgatgggagaaaaagctctgcttgcagtgatgcttctggcaattatagctgtggatatactggccgggaagcttgcccggagaccggaacaggtaagcgatataggaagacttctggagcttctggcagaccgggtctgtcagtttgtgatcctttcctgtctgattccgaagtattcactggcaaagatgcttctggtattattctttattaaagaaagttatacagcagtccttggctggagagtgattttgtatgcagataaagaggctcaatctccctggtatgataccatgacgaaggcagtgttctacatagtggcgctgattcttttggcaggacctcgaattccggcatcaacagccggtattctgatcggtgcctgcggaatctgtatgatggcagcctttgtaatgaacatagaagagatccgcgttgcagaggaaaaattccgacactctgttggagaaaaagttccgggcaggatcggataaaaaataaaataatcgggtagatataagggtgcagcttttatcaggctgcaccttttttaaaaaaagaagattggtgtagattcatgtagaactttcagagaaaataggatataatatagttcagaatcatacggaacgccgtattaaggctgtgaaaaccgaagaattctgaagttttcagtataaaatttaatggaggttcaacatggaaaacgtatatattatggagcatccgctgattcagcacaaaatttctctgctccgtgacaaaagcactggaacaaatgagtttcgtaagctgatcgaggaaattgcggttcttatgggatttgaggcgctgagagatcttcctctggaggatgtggaagtggaaactcctctggaaacatgtatgacaccgatgatcgcaggtaaaaagcttgcagttgtgcctgtgcttcgcgccggccttggaatggttaatggaatcacaactctggtaccgtctgcaaagatcggacatattggattgtacagagatccggagacacacgaacctcatgaatattactgcaaattgccggatcccattgatcaaagactgatcgtggtaacagatcccatgcttgcaaccggcggttctgctgtggctgcagtagattttatcaaagagcatggcggaaagaatatcaaatgtatgtttattatcgcagctccggaaggtctggagcgcctgcataaggctcatcctgacgtgcagatctacgtaggtcatgtggatcgtgagctgaacgaaaacgcatatatctgcccgggtctgggagatgcaggagaccggattttcggtacaaaataaaatcagaacaagcacaacaaaaacggatggtgtattttcggagagcgtgttttccgggacacgatccgtttttctgtgtaaaaagaaagagagcctgatacctgtttttgccgaaaagaaagtagttttgcacaaagacatcagggataacggtatcagaaaaacatatcagaagaaacagtataaaaacaggcagaaaggaacttgatttatgacaaaaaaacagcgggctctggaagtaattcagagactgaaagacgaatatcccgatgcgggatgcaccctggattatgatcaggcatggaagcttctggtcagtgtacgccttgcagcgcagtgtacagatgccagagtaaacgtagtggtagaagatctttatgcaaaatatccggatgtagaagcgctggcaaaagcggagccggaggaaattgaagcgatcgtaaagccatgcggactgggaaaaagtaaggcaagagatatcagtgcctgtatgaggatcctccatgaacagtatgaggataatattcccacaactttcgaagaactgctgaagcttccgggggtgggaagaaaaagtgcaaatctgatcatgggagatgtatttggaaagcctgccattgtaacagatacgcactgcatccgcctgaccaacagaataggactggtagacaatatcaaagagccgaaaaaagtggaaatggccttatggaagatcattcctccggaggagggcagtgatttttgtcacagacttgtttatcatggaagagacgtgtgtactgcccggacgaaacctcattgtgataaatgctgtctggaagatatctgcaagaaaaatatctgacacggaaggagaaaaggaatatggcattgaaggcagtacatcatattgcgttgcttgtatctgattatcagaaatcaaaagagttttatgtggataagcttggatttcgtattgtgagagaaaatttccgggaggacagaggcgattataaactggatctgatcctaaatggagttgagcttgagatttttgctccggcacaaaaagatcatgagcatcagctccatccggcaagaccgaatttcccggaggcatacgggctcagacatcttgccttcacagttacagatattgaaaaaacagccgcagaactcagggaaaagggaattgagacagaacctgtccgggtagacgagttttcgggagggaaatttacctttttcaaagatccggacggactgccgcttgagctgcatgaataattgagaagaaagtggtgaaaaaataatgattaaaaagcacgtagaggattctcgcacagaaaatacctatctgattatgccaaaacatatcaattgttacggcagactttttggtggaattctgatgcagtggatagatgaggtggccggaattgtggcacaccgtcatgcaggaagtattgtaacgacagcctgtgtggacaatctgaatttcaaagccggggcttatctgggagacacggtggtactggtaggaagagtgacttatgtgggaaaaacgtctatggaagtacggatagatacttacgcagaggatccggatggaatgcgcagaatgatcaacagggcttatgaagttctggtatcaatagatgaagaaggaaacaaacttgaagttcccgggttgattgtagaaactgaagctcaaaaggcagaatgggaaggcggacaaaagcgttatgatttaagaaaacaaagacggaaagaagggttttagaggaaagaaccacagatgaaatatggaggaaagttctaaaatttatagaataaatgttttttgttgaaaaatttccagataagtagtacactctggatataaatatacagaaacagataaaaacaaacttaaacagaaaggagaaaacaacaatgttaagaaatattcctccgattttgtcaccggaactgttaaaagttcttgcagaaatgggacatggagatacaatcgtaattggcgatgcaaattttgcagccgcttctatggcaaaaaaaggaactcttgtaagatgtgatggtctgaaagcaacagatcttatggatgctattctttcgttgatgcctttagatgaatttgtagaaaagcctgtttttattatggataaagaaccgcgccatgcggagcttgagtgtccggtatgggatgaatttaaagatattgtggcaaagtatgatgagcgaggggctgaggcttgcggaatgatttccagaaaagaattttataaaaaggcgagaaaggcatatgcagttgtagctacgactgagaccgcattttatgcctgtactattcttcaaaagggatgcttgtagaaaacaaataaaaacggacataaaacaacataaaaaatgcgtaaaagcggttatttcggatggaataccgcttttttcttatgaaaaaaagaatatatcatgtttgcatacgtgatatttgatatcgtaaatgtgtgaaaatgaatatataattctggaaaactgtgatattttactaaaaatgtgggttgaaactatggaaaagtaacaaaaagaaaaaaacggacaaaaacaaacagtaacatatttacatttgtggtaatatatgataaaatcgaactatcgaaaacggaaaaacatagcaaaatcaccaaaaacaaaaaagggggtaacacaatgaagaaaaaaataatggctcttgttctggcagcatctatgattacggttccatttgcgactgcttatgccagtgaaaaggatgcagcagctgaaaaaacagaggaatctgctgatgagacaaaagagacaacagaatctccggtagcaggaaagaaaattgcatatatcatgtatatgactccagctacaattttccagatgtggtctgattctttcaccgagactgctgaaaagctgggaatgcaggctgatacgtttttctgcaatgacagtgctgacacatggaaacagactattgaacagtgtgcacagggcggatatgatggactgatggtttctcatggtggtcaggaatatgcatatgattttctgacaggaattttagaacagtatccggatctgaaaattgctacctttgacactccgtttaaagatgcaaatggtgaagttgctaaaattccaggcgtagtacagtttttccagcaggatgcaggatttgcctccagtctggttgaaagtattatggatatgtaccctgaaaaagtagaagcaggagaaccggtaaatatactacaggttcagcagggagcaggatataacagcccgtttgaccggcgccagatcggataccagccatatgaggacgaaggcaaaattaaaacagttgaaagaattgctccaattgatgatcagaacgccacctcttctatgagagatgtaacagctgcaaccttacctaagtatggggagggtgaaattgatggaatctggtgctgctatgatgcatatgcgcagggagtatatcaggcactggttgaggcaaattcagatattccaatggtatcagtagatatctgcaatgaagatattcagtttatgcaggaaggtaaaaactggaaagcctgtgctactaccaattggagttcaaatggggaatttgcatgccgtgttctcgcactggaaatggcagatcagtatgaggatatttatgctgcatcctgctattatgaagatcctggcgactggatggaaattccgtctgtaattgttactcaggaaatggttacatcaaaagatggaatcaatattgaaaatctggctgaagttgccggtgaagaatattccgatacctcctggatgccgacttgcgattggatggttgatcttcttggtcactaatctatcttaaaggaattgttcttatacatatgtgaataaaagaacattaggattaggtgaggcgccggggctgtgttccggcgcctgtattttaagaattttgaagtaggggtgtaaaaactaaatggaaaagagggaatttatggataagattacacttggaacaagaaatgtctctattgaatttcccggtgtaaaagctctttccaatgtagattttgaaattgaaacgggagtaattcatgctctgatgggggcaaatggagcaggtaaatctacattgatgaaagttcttgccggttcaaatccaggatatacaggagatgttctatacaatggaaatcctgtagaattaagaaatccggcggcagctaaaaaacttggaatccagattgtatatcaggaagttgatatggctctgattccaacactgactgttgcagaaaacgttatgtttaatgaccttgtaatgaatatgggacataagcagtttgtaaattacggaaagatccgcaaagatgcaaaagaggctcttgcccgtttaaatgtaaatattgatgtacggcgtatgtgtggaacgttgacattggcacaaaaacagatggtattaattgcacgtgctgtacagagtgcatgtaattttttgattcttgatgaaccgacagctcccttgtctgatacagaaacagaagaactgttcagggtagtcagacatcttcgcaaaacagaaaatcttgcagttatttttattacgcatcgtattcatgaagtgttgcagatatgcgattcttatacagttatgagaaatggcgaaattgtggatacgacacccattacgcccaagacaacttcaaaagagattgtagataaaatgctgggacgttcatttgaagaaaacttcccgaaacaggtttgtgagataggagaaaaagcttttgaaattgaccatcttacagaacgggagggacgtgttcaggatatttccatgtatgtgcgaaaaggagagattgttggattagccggactggtagggggaggaaaaacagaactctgcaaaaccatttttggtgtatataagaagtctgacggtattataagactcaacgggaaagaactgaatattaagacaccttcagatgcagtaaaaaacaggatagcgcttgttccggaggagagacgcaaagagggtgtattggttgcagaaacagtgacatttaatacaacagcagccagtctggatgattattgtacattctcttttgtaaatgatcgcaaagcagcgaagaaagcagaagaatatgtgaaaagtttgagtataaaaacaccgtcgatcaagcagaaagtggcatatctgtctggtggaaatcaacagaaagtggcagttgcaaaatggcttgctgcagactgtgatgtctatatttttgatgaaccgactaagggtgtggatgtaggcgcaaaacaggaaattttcacattgattaataatattgcaaaagaaggcaactgtgttatttatgcaacctgtgagaattcagagttgttatctattacagaccgtatgtatgtaatgtttgatggccgcattacggcagaattagaaacagcgaagacttctgaggatgaaattatgcattatgcaacaggagcaacgactgtatacacaggctgaggcctttagtaacatatccattatgggaggaaaataatatggttcaaaatgctaaaatgaaaaatattggaaaaatgctgttgagctgggcggcggtgattgttttagttgttgcaattgtgatttttacaattgtgaaaggaacagcttttttttctgtggcaaaccttctgaacattcttcgtgcaatgtccgttgttacgatttttgctcttgctgcaacagtatctatggctccggacggatttgatatgtcagccggaacgttgggaacatttagtgcatatgtgtttgcagcatcatttctgtggtttggacttccactctggcttgcggttgtggtaacaattttgtttacaatgttttcttatttattaacaatgtttctgattcttgtctgcaagattccggatatgctggcaacatgtgcgcttcagtttgtacatgcggggttgggattagcgttcacaggtggaagtgccgtttcggcaggtcttggcgtaccgaaatgggtagcaaatcttcggggcggcgatacaagtccactgcgtgggggatggactgagggatcccagaacatcggaaaatccccatacataataattattatgatcgtgtgtgttgtaatctgctgggttcttctggaacgaacaaaacatggacgctatctttatgcaatgggtggaaataaaacagcggcaaagctttcaggtattaatgtaaagaaatatcgttttatggcaggtatgttcgctgctctgtttattgcagtggcaggtattgttgtatgctcacgtaattcagcagcacagattaacggatgtgacagttacctgatgagttctcttgcggcagtatttattggacgatctgtaggaggagcagaaagaccaaatgctcttggcacagttgtgggagcgcttttaattactgttcttgagaatggtctgaccatgtgtggcgttgtatattatgtgcttccggccgttaagggtgcagttctttgcctggcattggttgcagcttatattacagtaaaagaagactgataaaaaataaaatggaggttttttgatatgtctaaatttgatacttattttttaatgactacagaggatgccattgagtatgcaaaagtaaaagttccgcagatggaatgggattcaggaagtatgacatgcagagaaattggagatggaaacctgaattatgtttttaaagttacagatgacagaggccatagcgttattattaagcaggcaggtggtgtggcgcgtatttctgaagatatgaaactggatacagatcgaaatcgtattgagtccgagatcttggttcttcagggaaaacttgctcctggatatgtaccggaaatttatttttatgatacagttatgagtgcctgtggcatgcaggatttaagtgatcatgaaattatgcgtactgctatgctggagcataaaatttttccgaaatttgcagatcagatatcgacctttatggcgcaggtattaatgggtactacagatgtagtaatggaccaccaggaaaagaaagatttacagaggaaatttattaatccggaattatgcgatatttcagaagcccttgtttatacagaaccatataatgatgaattacacagaaataatgtgtttgctccaatagcagattttgtgaaagaaaaactttataatgatgaagagctacattgtgaagtggcgaaattgaaaatggattttatgacaaaggcacaatcgctgattcatggagatcttcatacaggttctatctttattaatgaagacagtactatggtgttcgatcctgaattctgtttctatggacctatgggatatgatattggaaatgtaattgcaaatatgatttttgcatgggcaaatggagacgtgtatggaaattcagagttctgtacatgggtggaagaagttattgtagatgttgtgaatctgacaatggaaaaactgcgtgcttattatgaggaacatgtaaccgatactatgtgtaaaaatgaagcatataagaattattatatggatactgttttggctgatacatccgcagttactggattggaattgattcgtcgtattgtgggtatggcaaatgtaaaggatattaccagcattaaggacgaagcaaaacgtgcgcgggcagaaaaaatttgtattatggcagcgattgattttattaaaaacagagaaactaaaaaatgtggtaaatgtttccttaatacattaaaagacgccattgctacaatagatgcataacagatagggtgcggcaattatgaaaggagaatacgattatggaaaacgctttaaatctggatacagtacgactggcagagaataaaaaagaaatagttattcttgatcagacacttcttcctaatcagtgtaaatatttaagtattaagaaagcaggagacatctgggaagcaatttattctcttcgggtacgtggtgctccggctatcggtgtgacaggcggttatgcttattatgtattggcagatcaaattgaaacagaagataagcacgagtttataagaaaatgtacggagatgatggagtatattaattcttcacgtccaacagctgtaaatctttcttgggctttaaaccggatgcataatgttatgctgaatgaaattaaccagatgagcatagagcagctgaagatacgcctgatggaagaagcagatgtgattcgtcaggaagacattcagatcagtcgcaatattggagaatatggatttaagcttctggatgaacttggaaaaggtgtaggaatcatgacacactgtaatgccggaactctggcaactgcaaagtatggtacagcacttgctcctatgtatatcgctctggaacatggatgggatcccaagaacgatatgcatgtatactgtgatgagacaagacctctgctgcagggagcccgtttaagtgcgtatgaaatgcaggcagcaggaattgatacttatgtacagtgcgataatatggcttcgtatacaatgaaagagggaaaagtaggtattatatttgtgggatgtgaccgcgtggcggcaaatggtgattttgcaaataagattggaaccagtggtgtggcaattattgcaaaacattatggaattccgttttatgtgtgcgcaccgtcctctacgattgacatgacactggaatctggagatgagattcatattgagcagagaaaaggtaaagaagttacagaaatgtggtatgaagagcgtatggctccagaaggagttggggtggtgaatcctgcttttgatgtgacagatcatagcctggttacaggaatcattacagagaaaggaattgcctacgcaccattcaaagaatcttttgaggcgatgggaatcaaaccagtagagaaatatgtagataaaaaataaaaggtaaagggcgacagtgatcgcccttttattgttaataatactgtacagaatttttagtaagccactctttccattctgaagaaaattcacagtcagtgataatagcgtccattttttccaggggaataactgcagaaaaggaagtcttatccagctttgtatgatctactacaagaaatttctggtgggcgtgctgaagtgcaattttataaagcatggcggaatcttcattaatatctgtaacaccaaattccatacatacacttctgcacgaaacaaatgctttgtcaaaaaaatattgctgaagagaacgcacagtgccgtttccggtgaatcctttggttcttgcggaaaactcgcctcctgtaagaaacagatgtacagtggaagaacgtgaaagaatattggcaatttcaagggaggttgtaacaacagttaattttcgattgacaatttttcgtgcgatataccaggaagtagtagatgaatcaagaaagataatatcactaggctgaatcagagcatcgcatttttgggcaataatttctttttcagtaatacgcaatacctgtctggttgtaacatccagatcattttggacaccttccagtatataggcacctccatgagtacgtataagttcctgatctttttccattgcacgaagatcacgacgaattgtttctttagtaacgttcaggcgttcggacagatcagaaatagtgacacttttttgttcctgaagcagttttttgatggcttgtttacgagtgattgctaacacagcgaaatgactcctttcatatatttaagcatctttgtttttaagatatcatggtttaagtgaaaaagcaaatacaagaactgtatattaaaaaagtttgaatattggagatatttttgcaagttacagtctgataactggaattctaggtataaacaggataaaaaagaaaatatgaataaaatgtacaattaatacggaaataaaacaacaaaagcagacaaaataattgacaaagcagacaaaaatgattaaaatatagttaaaaataactagttaaacttgataaaaacaattaatttatccaatacgcacaaacggaggtagaatatgaaaaaaattattaatgcgccggagacctatgtagatgatatgcttaaagggatttatgctgctcatcccgatcaggtaaaatgtgcagaagatgatcttagaagttattgcattgcacacaaaaaagaaggaaaggtcgctattattactggtggaggatccggacatcttccgttgtttcttggttatgtaggagaaggacttattgatggttgtggggtaggaggtgtatttcagtctccgtcacccgaacagatttatcagattgcaaaagaagttcatgcaggatcaggagttcttttcctttatggcaattatactggagatattatgacatttgatatggcatcagatctttgtgatatggatgatattgaatgtaaaagtattgttggggctgatgatgtaaattcacatgcagatccagatacgcgcaggggtgtagctgggatttattttatgttcaaggcagctggggcaagagctgatgaaggcggaacgcttgaagaagtagttgctgcagcgcaattggcaaaagacaatacacgtacagttggatttgcccttactccgtgcattattccggaagtaggtcatgcgaattttgaattgaaggaaaatgaaatggcaatgggaatgggaattcatggggaaccaggtgtatggaatggtccattaaaaacatcccgggaaattgccgaagagtctttaaatacgcttcttggtgatatgcctgtggaagagggggaagaagtagctgttttgattaatggacttggagcaacttctgttgaggaattatatatacttagccatgatgtaaatgatattctgaaatcaaagggaatcggaatttacaaaactattgtaggtgagtatgcaacatctatggaaatggctggcgcatctatttctatatgtaaaatgaatggtgagttgaaacgttatatggatcatccggtaaatacaccatttatttgccagaaataattatagttttgaggaggtttcatatggagataattgcatttaatcagattcctgatctgtttgccgttgtaggtaagctttttgtagagaaaaaagaagaattatgcgatatggatgctcgtctgggagatggggatttaggccttaccatgagtaaaggatatagttctcttccagaattgatacgtaatgaaatggatggagctggcggagatatagggaaacttcttatgaaagcgggaatgaagatgtcaagtcttgttccttctacaatgggatttctgatgtccagtggtgttatggaaggcggaaaaaatttaaagggaaagacagaaatagatgggatgggactggcagcatatcttgttggatttgcagccggaatacaaaaaaggggcaagtgtcagacaggtcagcgcacaatttatgattctgtatttccagcagctcaggcagcaaaagagttgacagaaaagaatccggaggcttctctgagtgaagttgtggcagttgcacttaatgcagcaaaagaaggaacagaatcaaccaagagtatggttcctgtatttggaaaggcagcagttcatgcagcgcaatgcgctggcattgctgatcaaggtgcagttgcaggttattataagattttgggactttataattatatatgtgggatgtaaacaaaaaggctggggcgattattcgtcccagccttcgtaaaaccggatatttacagaaatattccgtacaatatctccctcctgaagctccatatcctctttatcagaaacagatggaagattacagtcatcctcagaaagctccagagagatccagttataagctgcttcatttgcgttgtcaatggcatcgtccagggtgtcaccgtcagcatagcagcattccagatccgggaaaaatccgtgataggttccgttttccgttttgcggaataccgcaggataaataaatttcataaatgcctcctactgtttgctacatactgttatgaaagatattgtaacatattcttgcagcgatggaaaagaaaaatttgtttccgcatggaaaaaccgggatatattttatataatcagagtcgggaggtaaaagctgtgataaagttgattgccagtgatttagacggaacactgcttacagacagtaaagagctgtcacagacaactgtgcagattcttgatatggctgtaaaaaagggaatatatgtgataccggctacagggagatccttcagggcaatacctgaacagatccggaattatccgggtatccggtatgtgatcacatccaatggaggcgccatttattctgtcctggagaataagaggatttatcagtgtctgctgaacggacagacggttgaggaagcattggatattcaggtaccggaaaataccgccatagagctttttgtggatggaatcccttattcggaagaatcttatgtgaggtttccggaaaaatacggggccacggaatatggggcaaagtatgtaagggaaacaagaataccggtaaaagatataaaagcgtttgccatggaacacagaacggaactggacagtatggcatttatctgtggggacagagcaggcaaatgcacattggaaaaacagttaagagactcgctttctgatgcatatataacctcgtctgttcctcatatggtggaaattggacataaaaacgcaggaaagggaaatacgcttctatatcttatgagacttctggggatatccccggatgaagcaatagcctttggagatgcagataatgactgcagtatgctggaagcggtaaaatatggagttgctgtggggaatgctacagaagcctgcaaaaaagctgcagcttttgttacagcatccaatgaagaggacggagtagcaaaagctgtcagacagtttctgcagaaagcatgaagcggaaatttccgcattttgtagtatgaaccagataaaaacttaaaaaaatcgcacgatgtcctctgtttctttacgtttgggacggttgggctcttcagccggtatacctacggcaattacagaaacaatggtttcttcttctggaacagaaaggacttctcttattttctgtgcatctcgtattccaatgatcagtgtgccatagcccagttcttctgctttgagaacaaggtttgcgttctgaagtccaagatcataacagccccagccgttttcaagttcgttgtcagccgttccatcctgtttgaagccggagcggttgtgcacaaaagttgtgacaataagggctgcattttcggatttcagggcattgccggaaggaaggcagtctgtacggaactgttgggtcatttcttcggacagaagacagtagtaacggcctgtctgagagtttttccaggatggagcttcctgggcggcccggatcatttctaggatatcttctttgggaatggtatgccctgcactgtatttacggacacttcttcttttttcaattaatttttgaaattccatataggttcctcctttgggtgtataaatgaagtattttattgataccagatgttattattatgacattctttcgaggttttggcaaagagaatatgacttatgtaataaagttttacagatctgtgcctatggtataattcgatttggggtattttaagccaaatgctgaggtatataagctaaaattctgtctacagtttgtgcctcatattgaaaaagataaagaagaaccgtatattaaatttaaaaagggggaaacagtgcgggacggggcggagtcctattttttccaatagattttacgcaggctgttctgtaagttccgggttataaatacccaatgcagtataaagaaaaataatccacccacaaatactgccacaccttgaaaacaggtaaaaagctgctaaaataaaattgttcggtgcgaatgaaaaagaaaaagactcccacgttgtctgagaactgtaaagagtatctgacagcgtgggaatttgtttttattttttatgcccgtatattgcggtggttattgtgcaaaattggaaatttgcttatttatagtccgcagattacagagattttcatggagataaaagatgaaaaaaatgaaaaagttatgtgcggtggggctggcagccctgtgtctggcaggaagtatgagctgcttcacaatggcagaagcatcagaaaatgtgcaggagcaggctcaggatcagatgctgtattcgtcaagaatgtgggaaagtaatggtcatatttatactgtatataatgtagatgcagagggatatacatctctgtcaggaaattatatggatgccattgccgtatatgagggaaaggtctactggagaaaaaataacggggaagagaatgaacctgctgagatcatacggatggagccggacggttccggacaggaggttctggcagaaaatgcgcatccttcctcgcttctgtgcattgatgagggatttatctactatactgcttcagatgaaaagggagagcaaaaaagccgcaggatcaatctggacacaggggaaaatcaggaggctccgccatacagattcagagcgggaaatgaaaacttctggttttccacatctctggaagacgggatatggtattgctcggagcccggatataaaaatatcaggtcaatgtcaggggtaaacggccttcggctgggggctttggatcataagctttattatatggtacagggggaggattctttatatacaacctgttcctttgatgttgagaccggtgagacagagatactgctgagaaatcagcaggcaaaaagcattgtcagcggaaccggactttattacaaacaggaaagcaatgggtatacaacgctgtatcgaaaagatttacgtacaggtgaggaaaccagctatgacctgggagaatttcacctgtatatgggcggcggcttctatgagctgggggataaaatctgtcttatgcggtttcggccggaactaatgccggacaatacggagctgtgggagctggatacacagaccggagaaaaaagactgatcggacaatggcataattcaaatgcagttaatgcggcaaaggagccgtaatcctgaaaaataaatcttgacaaaaagagaacagaatattataatgaacaatgttcatattggaaacagttttaaatgtatgatcagggaaacaggagacgtatataatgaatacagttgttacctccaggaccgcaattcttgaagccagcagacagctgatccgggaaaagggatggtctgcattgaatatcagaagcgttgccggagcatgtggcgtttcagtaggttctatttacaattattttaattcaaaagcagatttgatggcagctgcggtagaaagtatctggtgtgacatttttcacttttcagatgagaatgcctttgacagctttaccgaatgtattcagtgggtatttgacagtctggaaaaaggagaacagaaatatcctggattttttgctctgcactccgtaggctttgaggcaggagaaaagacaggagggcagcagttaatggcgcagtcctgggaacatatgcgcaggggcttttgtatggtgatggctcaggacaaaaagatccgtaaggatgcctttgatgagagttttaccagagaaatgctggcagaacttgtattttctctgattcttgccaacatgctgcagaaaaaatatgacagtagttctattctggaaatggtcagaagactgatttactgataactgtgtgcagaacagattgcagaagcagacttttctgcaccttatttgggaacaaaatgaacaatgttcagaaaggaggcagataaatgctcaaagtaaaaaagaacagcttacttatgatcgcatgtctggtatggggaattgcagggatcaacattctgcgtataggactgttggcatatcctgcatacgttacagtgggaaacatcattctttctgttgcggtgttttctgtttttcagtattttatttttggaaagctggtaaaaaagcatacacagagaatacggacatacaaggaagaaaagcagtttttcctgaaattctttgatgtgaaatcttttgtgatcatggcggttatgatggcaggaggaatctatatcagagagtccggccttggaccggagatattcattgcagtattttattctggacttggcgcatcacttttgctggcagggattctttttggcagaaattatttcagagagatcagcttacagaaaaaaacagcacagagatgctgttaaattatagaaaaggagacaaatattatgcaggcttttggcgaaactttatttgatgtggtttatcttgttctggttattaccgtaggaatcaaaatgatcagacaaagcaaaggggacaggcagtatcgtctgtttggaattatggcagtcactctggggtgcggagatgcttttcatctggttccccgggcatatgcattatgtacaacagggctggaaaattatacagcggctcttggcatcggtaaatttattacctcgattacaatgacagtgttttatattcttctctattatgtatggagaaaccgctataagatcgaaggaaaaaaagaaattacaatagctgtatatctgatggcagctcttcgtattattctctgcctgtttccgcagaatgcctggacaagagctgatgcgccgctgtcctggggaatctacagaaacattccgtttgccattctgggactgatcgtgatcgttttgttttacagaagtgcgaaagagcacaaggacagagatttccgctggatgtggcttaccattgtgctgagctttggattttatattcctgtcgttctgtgggcagataccgtaccggcagttggaatgctgatgattcctaaaacctgcgcttatgtatggacagtaatgatcggatatcaggccatgagaaaaacagccagataagatgatatgcagtactgagaagccggccagccgggggatgactgccaatataagagtaaacagcgtcagaccgcagaggctgtcagaaaaaacaccgtataccaggtaaaaatatgcccggtatacggtgtttttgcagggattaaatatttttataactgggcgattgcagtgcttatcatttctctgcacttttcaatctgcggcatgtcttcaggaatgatggacgccagcggtttgcgtacgcctccgatattcagcccgttcattttaaggatttccttcatgactgcatacaggttgccgtgacaggagcacattgcatagatgatgcggtcaattttatactggatctctttggcccgtgcaatattgccggcttttaaagcctcgtctgctgcaaggaacagctcaggcataacggcataggtaccgccgatcccgccgtctgctccgatgagacgtccggaaatgaactgttcatccggaccgttgaatacaacagagtcgtctccttttacatccttgaacatctgaatatcctgtaccggcatagaagaattttttacaccgatcacatttggatttttcagcatttctttataaagcgggatgctcagcgccacacctgcaagctgcgggatattgtaaataataaagtctgtatttggagctgcgctgctgatatcattccagtactgcgcgatcgcatgatccggaagatggaaataaataggcgggatagaagcgatggcatcaactccaaggctttctgcgtgagctgcaagctcctggctgtctgccgtattgttgcaggctacatgggcgattacggtaattttgccttttgcaatcttcatcacattttccagaatgagcttgcgttcctctttgctctgatagatacactctccggaggaaccgcatacataaacgccttttacatttttgtcgatcaggtgttgggtaagagcctgtgttctttctgcgctgacacttccgtcatcctcgtagcaggcataaaatgccggaataattcctctgtatttttctaagtctctcatattgtcctccttttttatatcagccttttacagcgcccatggtaattccttttgtaaagtatttctggaatgccaggaatacaacaatgatcggaattgcggccagagctgcgccggccatgatcagaccgaagtccgtagagttttctgcctgcagtttggcaataccaagggaaatggtaagattgctggtgctgctcagcatgatcaactgcataaagtaatcgttccaggaattaataaaggtaaagatcgcaagagctccgatacctggtttgatcattggaagagccacgtctgcaaaggttctccattcacttgcgccgtcgatacgggccgcctccatcatctctcccggaatgccttcagcgaactgcttgatcaggaatacgccaaagggccagcccacaatagggaagatcgttgcccacagtgtattatacagattcagcgacgacatttcgcggatcagcggaatcaggataacctgtttcggaagcgccattgcgcatacgatcagtgtaaagataatggtacgtcccacaaagcgtttttttgccagggcatagccggccatagctgccgtgatacaggtcagcagcatggcaactactgccataaagatagtatttcccatccagcggattgcagccggaacttcaggtcctgcaaatacaatatccgtaaatggaacgtggatttcccataatggggctacctgtctgctgaaaagcttttcgtagtttgccagagtccattcctgcggaaaccactgtggtgttgtggcattgatcgcctggggcgttttaaaggagccggtaatgatccagtaaagcgggaatgtaaatccgatagccagaataatgatagtcaggtaagccaggattttatataattttgtctttgtaaattttgttttcatagcttcccctccttacttttcactggttactttaaactgtattgcagagagaaccgcaataataatggcaagaacaacgcccattgcgtttccgtatccgtagcggtacagcttaaatgcagtgtgataaatgtaatacatgatcgtgtctgtgctgtggtttggtccgccgctggtaagaagctggatcagggcaaagcactggaagctgttaatggtagtgataaccagtatgtaaagagtagtgggtttgatctgagcccatttgatcttccagaatacctgaagatgatttgcgccgtctacctgtgccgcttctacaagagactgatccacattattcagagcagatacataaagtacgataggctgtcctacagaagtggtgatcaaaataagaatgatacagccaagagcatatttttcatcacccagccagttgatatttttttcaagaagaccggtggatttgccgagataattgaaaataccgtaataattattgaacatccatttccacacaacagtaacagctacagaaccggtaacaaccggaagatagaatacgcagcggaacagggagcacagcgggcctgtcatattgttcagcactgagcctacccacagggaaaagatacaggttacaggtacggatacaatcacaataataaatgtattttttaatgcgcccaggaaaacaggatccgtaaacagttccttgtaattggcaaggcctacaaagatatcctcacggttcatggtagaatcaaagaagctggttataatacactggaacatcggatagatgacaaatcccagaaaaaatacaagacttggaagcataaacgcatatcctgcgatggtttctctacgggtaagcgctttactgcttactccgttttttttcttacttgctgccaagagaaatccccctttctattactcctacagagacaaaacgcccctcccgcgcaaacgcaggaagggcgcccgagttctcattttgcaaatatgcagttgcagtttcggttatattactgagctactgctgcatttgcggttgtagtaaattcttcaactgctgtcttaacatctgtgccggaaccaatctgctgaagcatgttccaccatgcggtacgggcctctgcccatccgcctactacctggtaataatcgcccatgtaatcaacgaaagtagaatattcagtcatcagttcatcgtcttcgtaaatgtttccgatatcttttaccggccagtagctagaagctttgacactttctactacctgtttttcatcgtttgccataaagtcgataaaggttttggaagcttcgatcttggcctcatcgccgttatcaaagataccgaatccccagataccgccgcagagctgaggctcgccgctttctgtagggaatgccattggaagaacatcaaatgcgatgttttcaagattgttcttttcctgagctacgttccagcagaatgccattgcaagtgttccgttgcagaaaaggttgatctcatctgcgccctggagagaagcgtcgaagttgattccgtccataccggaaagaagctcaagagctttaatgttttcttcgctgtttgctgtgtattcggtgtgctccggattggtaaaggtaccgccgtaaaggttgtttaccagtgcgcgggttccctggtcgccgccctgacctgcacagtaaactgcgcctacgttttcctggccggagtcataaactgcctgaactgcttttttgaagtcctctgtagtccaggtgcgggtttcttcgtcaatatactgcatagcgtctgcagcttcaaaaacgtctttattgattgccatggtatgagcagtcatacagagaggatactcataatatatgccgtcattgcttttgcatgcagcctcaacagacggataaatagcttctttggcttcatcagtccagagatcagcaaggtctaccattaatccttttgcaccccagtttgcaaccagacgttccggtccttccagaacaatatccggtgcctgtccgccttcaattgcagtgttgatctggtcatctccgtttgtgtagtccagatactctactgtcacgttgatctcaggatgcgcctcattaaagctggcgatcagactgtctactgttgcggcatcgccccagcttccgattgggtaggtccataaggtaatgtcagtcgctttgtcagctttttcatccttagcagcaaatgcagttacagggaatgccaatgtgcatgccaatgaaagcgccaagatttttcgatacgtcatattgtaccctccttcttatttggatgactacctgtcttggtaatcattaataaattgataataaaaatataagtcgctttcgtcattttgtcaatagatattgcgaaaactattataaaaattttcattttccgtaaaaaaattaaaaattttcatttacagcgtagtatcacaggacaaaatttcagggatgatctctgaaagagcttctgcaagctgtcggtgcccttcctctgtaaggtgcatgaaatccacattatttggttcagcagtaaccacctggtttgcatccagatatgcacagcccgtcaaatctgcgatctttttgtattcttccgcaagcttctgagatttttctgcgcagccttttcccatggttcctcctacctcggaagtttcatagcgtttgtcaatattctgaggcgttacaatgaggatagaaggcctgccgtttttccagcagtcagttgtggaaactgctttggagatcagacgcttcaggccaagcgcaatacattcggcagaagcgccgaaacgttctttggtatcatttgtaccaagcataatgatcagcagatctacaggctcatggctcataaggcatggataaatatagtccagaccgctgagcgcctcgtggatcggatcgtcaaaggtggtagtacggccgcttaaaccttcttccaggatcagccactggtctcccagctttttttgcagaagacaggtccagcgctggttttcatcaaatcgtcctccggttttggcacaatagccgtgagtgttggaatcaccaaaacaaactacatgttttttcatagtcataccctccaataatattgttttatcaatattataattaattttatgatttctgaaaatacttttctttatcagttgcggaggaaaataatttatattatactttttgttaggaaaataaggttttggagatttattataaagaaatcaggaggcagactcatgacggattctattttagacgcaatgacagaacagtataattctatgacccgttccggaaagaagctggcaaattatattttgtctaatactgcagaaactcaatatttatctattacgtcgctggctgaaaattccggtgtatcggaagcgactattacccggttttgccgtatgctgggattaaatggatatcatgagctgaaactggctcttgcaaaatcagaacgggcgaatacggccgctgattctgaagatgcgcttctggctgtcagcgacagtgggtctctggaaaagatgtgccgtaacctgagagactcttatctttcgtctattaatgagacgatttttcaactggatactctttctctgaaactggcagtggatctgcttgtgcaggcaagacatgtgtattgttttggacaggggggaagtatggtaactgcaaaggaagcctgggcgctgtttgcaacagtaactccaaagtttattcatattgaggattcccatatgcagaccattgcgactgcgcttctcactcccggagatgtgattttgtttttctcttattccggttctaccagagatatgcaggaagtactggatctggcaaaagaacgccatattcccattgttcttattacgcattttcgtaaatcactggctgccagttatgcaaacgtttctcttatctgcggctataatgaaaatcctctgcagtccggctccatagcggcaaaaatcggtcagatgtttttgatcgactgcttatttaatgcatactgcagccagaatacagatgaaaattcagcagcaagagatgcaacttcccaggctatttcacgcaagctgttataggctactgattccgggcaggaggctggcggaactgctttttataggcccgggaaaaagtggtgtaatccctgaagccgctctgaagagcggctttcataacaggtgttccccgggcgatgagggaacgggcaaggagaagccgtttgcttgtaacatagctgtggatggtgcagccggtttcttctttgaatttccgcatcatatgatatttgctgaaaaagaaccgggctgccagagcgtcaatggaaagatcctgctcaagattctggttgatatatgccacaagctgttccacatgggaatcagaggaataggatctctgatcagtaatgtactgtttttgcagaaaaatgcggtttacatgaaccatgaactcagtgaaaagagcctgtttcagaagctgatctccgaattgagtgccggagatcgcagtttccagttcatagagaatggattttatctgctccataagccgggtgtccagacggatcaggctgaagctgcggtcatttgctttctgaaagcaggtattcagttcggatgtctgaagatcgtctctgatccacaagataaaacgttcatagggaacggaaaaatcaatttcaggcatatgaatagccccccggcttacaaggataatatcccagggcttcagatgatatgcttttccttctatatgataggtgacttttccggagagaaaaacaatgattttatgaaaatcatgataatggtaaaaatattctttttcagtttggtctttaatatgaaacaaccggaaatcctcttttaaatatcctgttttttctttctggacaggtatggaataattgttttcctgctctgagtcccgggaaacgggaagggtatccggatggtatgaagaggttttcatatatttcagctcctggtgttatttacagtcagtttatcgcagatgaagaatgactgcaagagaaaaaaccagatgaggatcagactgagttactgtgaaggtagtaagcatcaatcacactgacaggggcagggggcaggaatataaaagcagtttttgcaatgcaacaggcattttatcctatatacatagaaaaaaatatcagatataataataacagaataaaggtgaacataagattcaatggagggttttaagatggcaggctgcattacaatggtgaaatatcagggacttggcaatgattatctggttctggatcctaataaaaatcgtgtacagcttcaggggaaaaagattgccctgatgtgtcagagaggatttggtctgggggcagacggtgttttgtacggacctgtagaaatcaatggcaaaacaggcgtgcatatttttaatgcagacggaagcgaggctgcgatcagtggaaacggcgtaaggatttttgcaaaatatcttatggatcagggatatgtaaaagaaaagaagttttccattgaaactttggccggtcccatcgaggtagaatgtctgaacagccgcgcgacagaatttcgtgtgaacatggggaaggcctcctttttgtcaaaggaaattcctgtaacaggagaggttcgtgaagttatcaatgaggatttctctttccatggaaaggattataaagcaacctgtctgacagtaggaaatcctcactgcattatctttatggataaggtcagcaaggatttggtaaaggatctgggtccttatgtggaaaatgcagacgaatttccggaaagaatgaatctccagatctgccgtaagattgacacaggaaatctggatattgagatatgggaaagaggttccggttatacaaaagcctccggtaccggaagctgtgccgcagcagtgactgcctatcgtctggggatggtggagagtcgtgtgaatgtgaaccagcccggcggaatgatccagatcgatattactgataacggggacatttatatgaccggaagtgttggatatattgctgacatgagggttgcggagagttttttctcctgatcgtttatgctatactgttatcagacaaacagatgaaagatatgtataagggattggagaaacaatgtatcactatgagaaaaagaacagaaaatcattaggcgctcagacagaggatgagttgatgaaatacatccttcaggaacctataaaaccaggacagaaaattcccaatgaatttgagctggcagagaaattcggtgtgggacggagtactgtccgggaagcagtaaaaggacttgtatccagagggatcctggaggtgcgcagaggctccggaacctatgtgatcaacaccaattctctggcggaggatcctttaggatttgggaaaatagaagacaaatatgagctggcattgcagttgtttgaggtaagactcatgattgagccggaaattgcctctattgcctgcaaaaacgcctcagaagaggacctccttcagctgaaaaagctctgtgatgagacggaagaattgtatctgggcgggcataaccacataaaaaaggatattgaatttcatacttttattgctaaatgcagcaaaaatcaggtagtggagcttcttcttccggtgattcatacagcagtgcttacctttgcgaatgttacacacagacttttgagagatgaaacaatccgtacccacagagccattacggaagcgattcttgcccgggattctgtaggggccagatgcgcaatgatcactcatctgacctataaccggcagacgatcatgaagatcatctgtgagcggaacagtaaggatatggaaaaaacatctgacgtttaaaaggacggaaagacgacttaaaaaagcatatggacataatgtacaaaaaacaaagcgattattcttggaaataatcgctttttttgtgtaaaaaacagaaaagaatttaaatacatcacatatattgacgggaaaaatggggaatcctataatgagggtaaacaacctaagacgtcagatgttaagagagaaaaatgcgttatatcaacaaaggaggattttatttatgtctatagaaggtactgcactgaaccctgtacggctggttgcagcggcactgattggactggtaattttactcgtactcatcattaagtttaaaatccaggcaatggtagccattctcattggcgcgatctccataggccttattgccggacttgcagttggtcatgcctttattccgcctacaccggggccggtcctggtggcaaccatgctgaacgtagaccttggatgggttattatagtaggcattttctgcggagtttttgcaatgatcgtagcaggtcctgtgtggggttccatttgcggaaagaaatatatgatccctgttccggaacatgtggcagagcagaacgatattgatgaatcaaagctgccgaatttctggactattgtcggaatcattctgattcctcttgtactgattattatggactctgtctgtggagttgttccggcgctcagcgcgctggcaccggtgttctcttttctgggagagccgtttgtagcccttctgatcgcaacagtggcagcaatgtttattcttggaatcagacacggctatacaactgaagagctggaaaaggttatgacaaaatctctggagcctacaggtcttatccttctggtaactgcctgcggcggtgtgctccgctatatgctgcagtattccggacttggcgaagtaatcggagacgcagtttcttctgcaaaccttccgatcgtagtagtagcctttgtggtagcggctcttgtaaggatcagcgttggttcttctacagttgccatgacaatggcagcagggatcgtagcagcccttccgggaattgcagagctttccccgctgtatcttgcatgtactacagcggcagtagcaggcggtgcaactgtctgctcccactttaatgattccggtttctggctggtaaaatcgctggtgggaatggatgaaaagacaaccctgaaaacatggactattatggaaaccctggtaggtgtgaccggatttatcgtagcgttgattatttctatgtttgcataataaagtgacggaaactgtttgaacacagattttctgtcagggaaaaagaaaggaagattgtgatgaaattagtaagtcaggaaatgagaaaaatagctcctgagctggatcctcttcgtattggaacaggctggaagccggaagatctttccaagccccaggtgattattgaaagtacttttggagacagccatccgggaagcggacatctgaatattctggtggaggaagtccgtaaaggaattgaaaaggccggaggtcatggcgcacgttatttctgtactgatatctgcgacggagaaagccagggaacagacgggatcaattatagtctggcaagtcgggaaatgatcgccaatatgattgaaattcatgcgaatgcaactcctttcgatgcaggcgtttatctggcaagctgtgacaaggggatgccgggaaatctgatgggtctggcaagagcagatgtaccgtcggtagtggttccgggcggaaccatgaatgccggaccggagatgcttactctggagcagcttggcatgtacagcgcaaaatatgagcggggagaaattgatgaggaaaagctggagtgggccaagtgcaacgcctgtccaagctgcggcgcatgttcctttatcggaactgcgtccaccatgcagattatggcagaggctttgggacttgctcttccgggaagtgctctgatgcctgcaacaagtcctgatcttctggaatatgcaaggcaggcaggagagcaggcagtaaagcttgcaactatgccggggatgcgtccaagcgagatcgtcacagaaaaaagttttgaaaatgccattctggttcatgcggctgtatccggaagcaccaactgccttcttcatattccggccattgctcatgagtttggcattgagatcacaggagatacctttgaccggctgcacagaaatgcccgttatcttctggatgtacgtccggccggtcggtggccggcagagtgcttctactatgcaggaggtgttcctgcaattatggaagaaattaaggagcatctgcatctggacgttatgactgttacaggcaaaacccttggtgaaaacctggaggaactccgaagaaacggtttctatgaaaaatgtgagagatggcttcacgaatttaacagacgctacaatgtaaatcttaccagagaggatattatccgttcttatgataatgccatcggaacggacggaagcattgccgttctcagaggaaatctggctccggagggagcagtgatcaagcacactgcatgtccaaaggaaatgttccgggcagttctgaacgcaagaccctttgacagtgaggaagagtgtttggatgcagtgcttcatcacagggtacagaaaggcgatgcagtatttatccgctacgagggtccgaaaggaagcggaatgccggaatgttttatacctctgaggcgatcagcagcgataaagaacttggaagaagcattgccctgatcacagacggtcgcttttccggggcatccacaggaccggttattggacactgcagccctgaggctgttgaaggcggtcccattgctctggtagaggaaggagatctgatcgagattgatgttccggcccgtaagctgaacattatcggagtcaaaggtcagcgcagatctatggaagaaattgatgagattctggaagaacgccgcaaaaactggcagccccgtgaacccaaatacaaaaaaggcgtgcttcgtttattcagtcagcatgcggtaagccccatgaagggcgcttatctggaatagatttttacaggaggcaattatggaagtaaaaaattctggtcaaaatacgcacatattcattaccataggagagatcatgcttcgcctgacccctcccaaccatgaaaaaatccgaatggcctccagttttgaggcaagctacggcggaagtgaagcaaacattgcgctggcgcttgcgaaccttggcatagacagcactttttttaccgttgttcccaataacagcctgggaaaaagcgctgtccggatgctgagaagcaatgatgtgcactgtgctccggtgatcttcagtacacctgaggagacgcccactcaccgtatgggctgctattacctggaaactgggtacgggatccgggcaagcaaggttacctacgacagaaagcacagtgccattacagaatatgatttcagtcattatgattttgaaagacttctggaagggtatacatggctgcatttaagcgggattactccggctcttggcaaaagctgccgggaaatgatccttacctgtctgaaaattgcccgtaaaaaaggactgacagtgagctttgacgggaatttcagaagtactctgtggacatgggaagaggcaagagatttttgtactcagtgtctgccttatgtggatgttcttctgggaattgaaccctgccatctctggaaagatgagacagatcacagtcagggggatgtgaaggacggtctgcccatgcagccggattttcagcagcaggaaaagatttttgaggaatttgtccgcagatatcccaatctgaaatgtattgcccgtcatgtgcgctatgcccatacgggaagtgaaaacagcttaaaggcttatatgtggtatcagggacatacttatgaaagcaggctgtttacgtttcagatcctggaccgtgtaggcgggggcgatgcttttgccagtggactgatctacgctatgatgaaaggatatgaaccgctggatatggtgaattttgcagttgccagcagcgccattaaacataccattcatggagatggaaacattacggatgatgtggataccatccgaagtcttatggatatgagttttgatataaaaagatagcagaaaggaatggataataatgaaaacacttgaagagcagttttatgaatatgcagtagttccggtagtcgttcttgatgatgcagacgatgcggctcctctggcagaagccctgataaaaggcggacttccctgtgcagaggtgaccttccgcacagaggcggcagaagaatccattcgtattatgagcgaaaaatacccggatatgctggttggcgcaggaactgttctgaccacagagcaggtggaccgggcagtggcagcaggcgcaaaatttattgtaagcccaggctttgatccggagattgtagattactgtatggaaaaaaatattcctgtttttcccggatgcgtttctccttccgaggtggcgcaggcagtaaaacgtgggctgaaggtggtaaaattcttcccggcggagcaggccggaggacttgccatgctgaaagctatggcagctccttataccatgctgaagttcatgcctaccggtgggataaatgcaaagaacctgacagactatcttggattttccaagattctctgctgcggcgggagctggatggtaaaaggcgatatgatcaaaaacaaagaatttgacaaaatcacagaaatgacaagagaagcaacagaacttgcggcagcggcacgcagatcataatggaggaagagaagatgaacctgaatttaagaccaaaagaagaatgtacatttgacgcagtatctctgggagaggttatgctgagactggatccgggcgagggaagaattcgcacagcaagaagcttccgcgcatgggaaggcggcggagagtataatgttgtccgtggcctgcgccgctgcttcggtctcaaaacagcagtgatcacagcatttgcagacaacgaagtgggaatgcttatggaagattttattctgcagggtggtgttgatacttctcttattaaatggatggaaacagacgggatcggaagaacctgccgcaacggtctgaactttacagaaagaggctttggtatccgtggagccatcggctgctctgaccgtgccaacacagctatttccaaggcaacacctgaggattttgattttgagtatattttcggtgagctgggcgtacgctggctgcatacaggtggtatttacgcagcactgtctgaacagtcctgtgaaactgttctggcagctatcaagactgcaaaaaaatacggcaccattgtttcttatgatctgaattaccgtccttctatgtggagcgccatcggcggtctggaaaaagccagggaggtcaaccgtgaaattgcaaaatatgtggacgtaatgatcggtaacgaggaggactttaccgcatgtctcggacttgaggtagagggcaatgacgcggagctgaaagaactgaatctggacggttaccgtaagatgatcaatcatgcggcagaaatttatccaaacttcaaggcagtggcaactacacttcgtgaggtaaaaacagctaccgtcaacgactggagcgccatctgctgggcagacggacagatttatcagtccagagaatataagggactggagatcatggaccgtgtaggcggcggtgattcctttgcttccggactgatctacggtcttatgactacaggaaatgcagaaactgcggtgaattacggtgctgctcacggagccctggcaatgacaacaccgggcgataccactatggtaaataaaaaagaagtggaagcagttatgggcggcgcaggagccagggtaaaacgataagacaaaacaataaaaaacaagtgctgcagagcgccggtttcttcagagcagaaaccggcgtttttcgttgaagattttcagggtccatgttaaaatatacataattatcatccggtatatgggaagattacagagaaacggaggagagctcatgaagcttacaatgcttggtacaggcaacgcacttgtgacagagtgttacaatacctgttttgttgttcagaatggaaaaaaacatctgcttgtggatggcggcggaggaaatactctgctggctcagctgaagcatgccggatttgactggatggatatgagagagattttcgtaacccataagcatgtggatcatcttatgggaattgtgtggatgatccgcatgatctgtcagtatatgcgccaggggcagtatcagggtgaggcatggatctacggacatgacgaggtaatagcgattctgaaagaaatggcagacaggcttctttccggaaaagagacgtgttttatagggaacaggctgcatatggaagtggtcggagacggggaagagcgcactcttatagggaaaaaggtgactttttttgatattggctccaccaaagcgaagcagtacggattctgcatggatatgggagatggagaaaagcttacctgctgtggggacgagccctacaatgagtgtgaaagaaactatgcagaaaacagcaaatggctccttcatgaggctttttgtctttatgaccaggcagaggagtttcatccttatgaaaagcatcactccacggcgaaagatgcttgtgagctggcagaaagtctgagggtgaaaaatcttattctgtaccacacagaggataaaaatatttccagaagaaaggaactgtacactgctgaaggaaaaaaatacttccggggaaatatttttgttccggaggatctggaaaccattgatctgtagaccattgatctgcagatcgcagcaacaggaacattccgccggtccctgcggaattaaggtcagcaggcaggaaatataaagactgtcatttccggcttctcttgaagtttggggcaggatatggtatgctaggaacacttgatacgtaccggtttttcggaaccggcactgtcttgacaaatataaagaaagaaggtgaagctgtggttgagttagatcagttcaagagtattcttgcaacatacacagaaccattagtggaagtgagggattcactttgacctggctaataaagaaaagcgggttgaagaattagagcgcgagatggaagcgccggatttctgggatgatgcagaaacatctcagaaaaaaatgaaagaattaaaaagcatgaaggacgacatggaaacctatcataatctggtgacgcagatggatgatatggaaactatgatcgagatggggtacgaagaaaacgatccggatctgatccctgaaattcaggagatgctggatgagttccgtactgattttgataacatcagagtaaaaacacttctctcaggagagtatgacagtgaaaacgccattatcaagctgaatgccggagcaggaggaacggaggcctgcgactggtgcggaatgctgtaccgtatgtacagccgctgggtggaccgcaaaggttttactatggaggtgcttgattatcttgacggcgatgaggcaggtgtaaaatctgttactttccaggtaaacggagagaatgcctatggctatctgaaatccgagaaaggcgtacaccgtcttgtgcggatctctccgtttaatgcagcaggtaagcgtcagacttcttttgtatcctgtgacgttatgccggatatcaaaaaagacctggatgtggagatcaatgatgaagatatccgtattgatacctaccgaagcagcggcgccggcggacagcatatcaataagacctcttctgccatccgtatcacacattttcctacaggaatcgtggtacagtgtcagaacgagcgttctcagcatatgaacaaggataaagcgatgcagatgctgaaagcaaaactctatcttctgaagcagcaggaggcggaggaaaagctttccggtatccggggagaggtaacggagattggctggggtaatcagatccgttcctatgttatgcagccatatactatggtgaaggatcaccgtacaaacgaagaaaccggaaatgtggatgcagtgatggacggaggcattgatctgtttatcaatgcatatctgaaatggatcgctctgtcaaagaaagcggagtaatatagtaacgttcacagtagcttatgctcctctctttatgagtgccctgcaaaaaatacttgcagactgtactcaggtgtgataacatatccctcgtaggaaaacaggtgtctttttgaaacggacatcccttcgggggatatctttttatcacatacaggagaaaggacatggaaaaaacaacagaaaaaaataaatattatgtagtaaaagaaagggcggttcctgaagtacttttgaaggtagtacaggcaaagcgcctccttgattcggaaaaggtcagtacggttcaggaggcggcagagcagacagggatcagccgcagttctttttataaatataaggatgatatttttccttttcatgaacaggcaaggggaaaaacaattacctttattatacagatggacgacgagcccggacttttgtccgcagttcttcagactatagcaaagtttcacggaaatattcttaccattcaccagagtattcccattaacggagtggccacgctgactttaagtgtggatatcctaccgggaaggggagatgcagaggctatggtggaggatattgagagaactgaaggtattcattatctgaagcttcagggaggagaatagccggaccatcgaacagaaaaggctgttgcgaagcagcgtaaaagcagaaaacagccggaagaaacttatatgggaggaagatatggtaaatatagcagtattaggatacggcacagtaggcagcggtgtcgttgaggttatcaacacaaaccataagagcattaataaaagggccggcgcagagatcaatatcaaatatgtactggacctcagagacttcccgggagatcctgttcaggagattctggttcatgattatgagatcattgccaatgatccggaggtagatatcgttgttgaggttatgggaggcattgaacctgcatatacctttgtgaagcgtgcgctggaggccgggaagagtgtatgtacctctaacaaggctcttgttgcaaaacatggtccggagcttatggaaattgcccgtcaaaaagatattaatttcctgtttgaggcaagctgcggaggcggtattcccattatacgtgctctgaattcctctcttacagcagatgagatcgatgagatcaccggaatcctcaatggaacaacaaactatatgctttataaaatgagcacagaaggctctgagtttgatgcggttctcaaagaggctcaggaaaagggatatgcagaggcggatcccacagcggatgtggaaggctatgatgcatgccgtaaaattgccattctttcttcacttgcctatggaaaattccttaattatgaagaaatttatacggagggcattacaaaggttacaccggaagatatggagtatgcggcagagctgggaatgacagtcaagcttctggcaaccagccgtaaggtaggaaatgattctttttatgcgatggtagctccgttccttctgggcaaaaacagtccgctgtacagcgtcaacggagtattcaacagtgtgtttgtacatggaaatgttcttggcgacgccatgttttatggaagcggcgcaggcaagctgccaacagcaagcgctgttgtggctgacgttgtggacgaggcaaaacatcttcacagaaatattatgacaaactggaccagcagaccgcttcatctgatggagctggatcaggttgcgggaagattttttgtacgggtaaaaggagctactgtagagcaggtggaggaagtattcggaaaggtcgagatcgttaatctgaaaaagcttccgggagagtttgcatttgtgacttctgtgatgaagcaggctgaatataaagaaaaagcagcccgtctgaatggaaaagtggtttccatgattcgtgtaaaagactgagctgaagtgcacctgagacaacgggcagccgggagacagtactcagaagtgtacctgaatgtctggaaataacaggcagcgaggaggtaattatgaaatatgttgtggttttgggagacggaatggcggactggccaatggaaagtctgaatggcggaacacccctttcctgcgccgttaccccatgtatggatgaactggcgggaatgtccgaaatcggaactgtttccaccatacctgaaggaatggcgccgggaagtgatacggcaaatctctcggtgatgggctatgatcccaggaaatattacacagggagatctcctctggaggctctgagcatcggagtggatatgaaggaaagcgatgtggtttatcgctgcaatcttgtgactttgacagaggaggatgttccttatgaggaacagagaattctggatcacagctccggagagatcagtacagaggacgcggcaattcttctcagagatgtgtgccaggagctgaaaaatgaaaactgcagtttttatgtgggaaccagctatcgtcactgtcttgtgtgggaaaatggaaaaaatctggagcttacaccgcctcatgatgtgctgacacagagggtcggaaattatctgccggaggatgaaatgcttttgtccatgcagaaaaaaagctatgagatcctgaaggctcatccgctgaatcggaaacggaaagagcagggactgaacccggcaaacagcttctggttctggggcgcaggcacaaagcccatccttacatcttttgagaagatctatcacaaaaagggagtgatgatctctgctgtggatcttctgaagggaattgcagcgggagcagaaatggactgcaggatcgtggaaggagcaaacggcgggcttcataccaactatgaagggaaagcccgggctgcggtaaaggctctgacagaggaaggttacgattttgcgtatattcatgtggaagcgccggatgaaatggggcatcagggaagcgttgaacgcaagatccaatccatagaatatcttgatcagaggctgatacgcctggtgaaagagggactggacgcatcgggagaggattaccggatgttgatccttccggatcatcctacgcctgtgaaggtgcggacacatgtggcagagccggtaccgtatcttctttatgacagcacagctccccggagccacaactggcattataatgaaaaggaagcactggaaagcggaatcaaagtagaacacggctgggatatgatgaaatatcttttcggaggaaaattatgttaattgtaaaaaaattcggaggcacctcggtggcaaataaagaacgtatttttaatgttgcccgcaggtgtatcgaggattataaaaatggaaatgatgtagtagtggtgctttctgcaatgggaaagtacacagatgagctgatcgccatggcgcaggatatcagtgaaaagccgccaaagagagaaatggatatgctttttactatcggagaacagatgtctgtagctcttatgagcatggcaatggacagcctgggcgttccggcggtatccctgaatgcttttcaggtagctatgcataccacaagcgtatatggcaatgccagactgaaacgaattgatacagagcgtatcagaagagagctggacagccgtaagatcgttgtggtaaccggattccaggggattgataaatatgatgattatacaactctgggaagaggaggctctgataccacggcagttgcccttgcggcagctctgcatgcagatgcctgtgagatatatacagacgtggacggagtttatacagctgatccccgtaaagtgccgtcagcaagaaagctgaaagaaatcacctatgatgaaatgcttgatctggcaacactgggagcgggagtgcttcacaaccgttctgtggaaatggctaaaaaatacggtgtacctcttgtggtacgttcaagtctgaatacaagtgaaggaactgttgtaaaggaggaagtaacagtggagagaatgctgatcagtggagttgcccttgatacagaggcagtgagaattgcagtaattggtctgaaagatgtgccgggcgtggcgtttaagctttttgatgttcttgcaaagaaaaatattaacgttgatgtgattctgcagtccatcggacgtgcaggaacaaaggacatttcctttacagtggacggaaaggatctggatgaggctgtggcaactctggaagaacaccaggcaagactgggatataaagaaatccattcagagagaaatgttgcaaagctttccatcgtaggagccggtatgatgagcaatccgggcgtggcggcaaaaatgtttgaaagcctgtataatgaaggggtaaatattaacatgatctccacttcagagattcgtgtgaccgttctcattaatgaaaaagacggcatccgggcaatgaatgcagtacacgatgcctttaatctggcagactgaaagagcaggaactgtctgatctgcatagaagaaaaatcttccgatcctgttacagtatattttgacataaaggacaaaaacatacatgaaacacagataaaattgtgaaaaaatactggaaaaaacttctggattcagatataatggggaaaatgaccaatggaggatcaatctatgaggaaaaagtatctagcatttctgcttgccggatgcatgactgccggtgttccctcaatggcttgggcggcagaacagacaacagaagcggctgcggaagaaacatcaggcggggaggctgctccgtcagaggaaacagcagcggttcagacagcgcttggtacagatgtttacagttttcaggcagaatatgcaggtaatctcatacagcttcctgtgaaatatgaagattttacagttcttggatggacgctcagtaaaaatgacagtccggataccatggttcccccaggatcatatacaatggtgacatttaacaacggtgaagcaagcgtttatgcagatatgatgaatttcggcattaatgaggcggctgtttccgactgcctggtagccggcatcaagtttgacatgagctggggtgacattgatctgactgccaatccggtgaagcttccgggcggtatttccatgggagtttccaatgtggacgatattaaagcagcatatggagaaccaagcgatacctatgattcagatctctatacaaaaatgacttaccagaaggatacctatgaacgtgtggagctttatgtttataaagaaaccaatacacttcttcaggctgatatcaggaactttaaagaaccggaaggtttcgataaaggcagtgtcagtacagaagtaccggagattgtgacaaattatcagactccggcagctctgggaagtgattttatggatccggaagtagagttcatgggaaatctttatcggcttccggctcctgtttccgcctttctggataacggctgggaaatgaaggatgtggcagaggatgcctttgtagagggagtcggcctggaatttattgatatgatgaaagataaccagaccgtgagtttttccgtttataatctgacagaaaatgcaacctctgttgaaaactgctttgtgacagaacttgattttggctcctatgacccggaggttcttgcgctgaagctttcagagaatattactcttggcgctgataagagtgaactgattgcaaaggccggagagagaggatacctttacgaagacgaagacaactatcttaccatttatcctgataaggattcgaaactggaacattcggtacagttctggtttaacgaggaggaaagtaccacaaaggttgcaagtattacggttcatcacgaaatggacgaagaatagtatatctggccgcttatctgatttgatcggataagcggttttcctgtggtgaagaagaactgcagctttcatgggaccgggacaaaactttcgcaaatcgtaaaaaaatatcgacacttttattaattcgtgctaaagtatctaaatagcagaagaaagagagggttgaaaatgattggaaacagacgttactggaaagcctgtgcaaagcagtttttaagtggaaaatggggaattgccattctggcaatgatggcggcaccggcattaaatacaataggaacaatggctgcaattaaactttttcccggagattcctttctggcatggcttctgggagaagcttttctgtttattgtttctctgctttccatggtgatcagtacaggatataattttatgcttctgaacatggcccgtggacgggagtacagattcggaaatctgatctatatgtttaaaaaaggatcagacggagtattgtcggctgccctgatcatggcgctgatcgatacggttcttatgattcccttttattatatggtaaacatgactgctccggcagcagagacaatggaagcggtgctggaatggagtcagccgattatgtacagtgcgctggcagcaacagttctgggagttgtgattaaacttccctttgccatggcattttatatccttgcagataatccgcagatgaaggggagagaggctctgaaaaaaagcgcgtctctgatgaagggacatatgatgcagtatcttgtgctgcagatcagctttattcctctgatgtttctttccatactgtttctgtatgtgggcttattgtgggtaatgccatatatatacgccacaaatactatattctatatggatgtgaccggagagctgaaagaaactcataaaaaacatatgcatgaggtggcagactggattccgaaagaactggaagatactgctgcagataaagagttacaggaacagcgcacaggagatgattataattcagaggcgtagattctgataaaaatattttcgtgagaaatagatgcgaacaaaacaactggaggaaaatatggatattattcagataattacaaaggagctgagtgtagaaaagtggcaggtggaagctgcggtgaagctgatcgatgagggctgcaccattccgtttatttcccgttaccgtaaggaagcaacaggttccttaaatgacgagcagcttcgttctctccatgagagacttctgtatctgagaaacctggaagataagaaaaatcaggtgatcggaagtattgaggagcagggaaaactgacgccggagctgaaaaaacagattcttgaagcccggacacttgtggttgtagaagacctgtaccgtccgtacaggccgaaacggcgtacccgggctattattgcaagagaaaaaggactggagccgctggcaaatatcctgatgcttcagatgacagataaagcgcctgaaaaagaggctgaagcttttgtatccgaagaaaaaggcgttgcagatgtaaaggctgcccttgacggagcaaaagatattctggcagagcatatttctgatgaggcagattacagaatttatatccgtaagctgaccgcacagaagggaaccgttgtttcttctgccagaaagcctgaggaaagctctgtatacgagatgtattatgagtttgaggagccggtgaaaaagcttgcaggccacagagttcttgcgctgaaccgtggagaaaaagaaaagatccttaccgtaaagatcaatgcgcctgaggaagagatcctgggatggcttacccgtcaggtgatcaaaaaggacaatcccaagacgactcctgttctgaaagaggttgtggaggacagctacaagcgtctgatcgctccggccattgaacgtgagatcagaagtgagcttacagaaaaagcagaagacggagccattcatgtatttggaaaaaatctggagcagcttcttatgcagccgccgatcatgggcaaggtggttctgggatgggatcctgccttccgtaccggatgtaagctggcagtagtggacgctacgggaaaggtcctggatacaacagtgatctatcctacagctcctacttctgaggccaagatccgtgcagcaaaggacacactgacaaagctgatcagaaaatataatatttctcttatctctctgggcaacggaacagcatccagagagtcagaacagatcattgtggagcttctgaaggagatcccggagcaggtttcctatgtgatcaccaacgaggcaggagcttctgtatattctgcaagtaagcttgccacagaggaatttcctaattttgatgtagggcagagaagcgcggcttctattgcaagaaggcttcaggatcctcttgcagagcttgtgaagatcgatccgaaatccattggcgtgggacagtatcagcatgatatgaaccagaagaagctgggagaagctcttggcggagtggtagaggactgtgtaaataaagtgggcgtggatctgaacacggcttccgcctcccttctggagtatatttccggaatcagtaaggccattgcaaaaaatatcgtggcatacagagaagaaaacggtcgttttaacagcagacgggagcttttgaaggtggcgaagctcggaccgaaagcatttgaacagtgcgccggctttaccaggatcacaggcggcaaaaatcctcttgattctacaagcgtacatccggaaagctatgaggcggctcagaagcttctggaaaaaatgggatttactactgaggacattgccggaggaaagctcagcggaatttcccgtaagatcagcgattataaaaaactttcagaagagcttggagtgggtgagatcacactgagagatattgtgaaagaactggaaaaaccggcaagagatccccgtgaggagatgccgaaaccggttcttcgtaccgatgttcttgatctgaaagatctgaaagagggaatgatcctgaagggaaccgtaagaaatgtgattgacttcggagcctttgtagatatcggagttcatcaggacggtcttgtgcatatttcagagatcagtgaaaagtatatcaagcatcctctggaagctgtcagcgttggtgatgtagttgacgtccgcgtactgggggttgatatgaagaaaaaacgtatcagcctttccatgagaggaattaaataaaaagataacatggattgagataaaaaatgcctgcacttcaaattgaaatgcaggcgtttttttgtcagcttaacagtgcggaatcgttggaaaattcctgaccgcttgctttttcaaactgatccagaagatttcttacagtcagttttttcttttcttctccttcaatatccagaatgatctttccttccatcatcatgatcagtcggtttccgtgattgatggcatcctgcatattgtgggtgatcatcattgtggtcaggtgatcacggttgacgatcatatctgtgatctccagaacctttgctgcggttttgggatccagagcagcagtgtgctcgtccagaagaagaagctttggctttttcagagttgccatcagaagggtaagagcctgtctctgacctcctgacagcagaccgaccttggaggtaagtctgtcttcaagaccgagaccgagaactttcagaagctcccggtattcatcccgttcttttcgggtgattcccggacggagaaaacgtgttttgccccggcgctttgccagcgccagattttcttcaattcccatggttgcagcggttcccgtcatgggatcctggaaaacgcggccgagatatgcggctcttttatgttcggaaagcctggtaacatcagtgccgtcaataaggatctggccttcgtctaccatccaggttccggctactgcattcagcatggtggattttccggctccgttgcctccgatcacggtaacgaaatctccctcctttaaggtaagggaaagtccgttaagggccagtttttcatttatggtgccggggttgaaggttttatataaatttttcagctcaagcatttgtattacctccgcgtttcattggttttgcaaaatactttgctttccagtaaggaactgcaagaaaaacagcaaccacaagtgcggacagaagcttcagaagatctgtgtcgattcccatccagatcactgcctgaagaaccaggtagtacaaaatggaaccaagagccacactgaaaagacggagcgcaaagttgcggaatatttttccgaaaacagcctctccgatgatgacggctgccagaccgatcacaatagcgccgcggcccatattcacatctgcaaagccctgatactgggcaagaaatgcgctggagagagctacaagaccattggagatcataagtcccagaaccttggcgaaatccgtgttgatgccctgagctctggacatatttggattacagcctgtggcgcggagagagcagccgatttccgttccgaaaaaccagtagagaacagctatcaggatcacaataaaaacagctacgatcagaatggtgttctgataaaaaggtacgtcctttatatttctcagagataccagaagatcatacttactggaattgactgcctgattggcttttcccatgatcttgaggtttacggaataaagtccaagctgagtcaggattccggcaaggattgcgggaatccccataactgtatggaagattccagtggcaagtccggccagcattccggctcctgtggcagccagcatggaaacccagatgttctggccgctcatcagcatcatgatgcacactgcgcctccggtacacatggtaccgtcaactgtcagatcggcaacatccagaatacggaaggtgagatatacgccgatggccataatgccccagatcagtccctgggcagcggctccgggaagggcgtttattaaactcataatatccatggggaacctcctggcttattcttcagcagcgatggcttcgtagtcatccggaatttccagtccaagctcttcgcagatttccgggttatattttttggtgaaattcggtgcgtattccacaggcatttcagcaacatcttcttcgcccttcagaatttttacagccatttttcctgtggcagtaccgagatcatagtagctgatagaaagtgtggcaacgccgcatccgctgcagataccttcttcacctgcgattaccggaaccttttccggaaggcagatattgttaatgatctcagcattggaagctgctgtgttgtctgtgggaacatagatcacatcgctttcggaagccgctgtggtgacaacggaagaaagatcgttggaatcagaaaatgcataatattcacaggtatatcccagcttttcaagttcttccttcacagtgtccacctgatactgggagttgggttcagcagagcagtagagaagtcctacattttttgcatccgggaacagctcgttaagcatagcagcctgctgatcaagaggcgcaaggtcggaagtgccggaaatgtttgttcctaccgtaccgtcgaaatcatcaagatccagagcaacgccgtattctgtaacagcagtgcccagtaccggaatatcttcagttcctgcggctgctgcctgaagagcggcagttgcattagccagaatcagatccacatcattagaaacaaaattattgataatagtagaacaggtattggagtcgccctgtgcgttctgttcgtcaaaagtaaccttgtcaccgaattcttctgtgagagcgtctttaaagccctgtgtggcagcgtcaagagcctcatgctgaaccagctgacagatgcccacattataggtgtcatcagcagccattacaggtatgctgcaggtaccggcagccattacagcggaaagtgttaaggcaaaaatttcttttttcataatatatatcctccttttattccatttgtgtttaactgtacagagagaagatttacttctctgcttttaacttctaaagtataacgctttaacgctaagaagtcaagcggatgaacaataaagaaaatagtagcttaaaaaaatttagttagccgaaaaaacagtttgaattttctgattgtattgacaatttacgccattttcggtatgattgaagtacttgcagagaggcggaacgcagacggtgttgtgcctctttatgtttcataaaacatattcactgtgttcctgcgcaggcaggaatacctatgggtaagaatggaggaaaagaggatgaaaaaagcattagcagtaggtctggcagcggctatggcagtttccatgacagcgccggtgtatgcagagggagacggtgttgcaaaagaagacctgaaagtgggaattatttacattggtgacgaaaacgaaggttacagcgctgctcatatggcaggaattgatgagatggttgagaatctgggactggaagaagaccaggtgatcgaaaaaactctgatcggagaaaacgaggcggcttatgacgcagcagcagacctggcagaccagggatgccagatcgtgttcgcaaacagctttggtcatgagacttatgttctgcaggctgcaggagaatatccggaggttcagttctgccatgcaacaggaactcaggcaaaggcaagcggacttgcaaacatgcacaactattttacaaacatttatgaatcccgttatgtatccggtgttgttgccggacttaagctgaacgagatgattgaagccggagagatcacagaagatcaggcaaaaatgggatatgtaggcgcattcccgtatgcagaggttatttccggatatacttctttctatcttggcgcaaagagcgtatgccctgcagttactatggaagtaaaatatacaaacagctgggcaagctttgacctggaaaaagagtgtgcagacgctctgatctctgacggatgtgttctgatcagtcagcacgcagatacaacaggcgctcctacagcatgtgaggcagcaggcgttccatgtgtaggctataacattgatatgacttctgttgctccgaacacagctcttacatctgcatccattaactggggcgtatattacacctatgcagtgcagtgcatgttggacggaacagagatcgatgttgactggtgcaagggcttcgcagatggcgcagacagactgacaccactcaatgagaagactgtagcagaaggaacagaagaaaaggtaaaagaagtagaggatgcaatcattgacggttctcttcatgtatttgatacttctacatttacagttgacggcaaagaagttaccacatatgagaaagatggaacagagtacgtatctgacggatatttccatgagtctgaattcggatctgctccggcattcgatcttgcgatcgacggaatcacctctatcgtggaataaggcagatacacggcggagctgcttgtcagcagctctgcttttttatatgatggaatacttttaacaacaggattcgattgtataaaaaagcagagcaatctgtatatagtataaatttactgttcaatgcatcaaaggagggaatagaagtgggagagaattatgctcttgaactgaaacagatcaccaagcgtttcggttccgttctggcaaatgatcatgtggatctcactctcagaaaatccgagatccttgcgatcctgggagagaacggaagcggaaaaaccacgctgatgaatatgatctatggaatttactatccggatgagggacatattctggtagatggaaaagaagttacgatccgctcgccaaaggattctcatgctttgggaatcggtatggtgcaccagcattttaaactggtggatgttcttacagcggcagaaaatattgttctcggtcttccgggaaaagcaatgctgaatatgaaaaagatcacagaggagattcaggttcttgttaataaatatggatttgacctggatctgtcccagaagatctatgaaatgtctgtttcccagaagcagacggtagaaattgtcaaaatgctttacaggggagccaggatactgatcctggatgagcctactgctgttctgactcctcaggaggcggacagactgtttgatattctcagaaatatgagggacgacggatgctccattatcattatcactcataagcttcaggaggttctggctctttctgaccgtgtggcgatcctcagaaaaggctgctacatagatacggtagagacttccggcgcaagtgttcagagtctgtcagagatgatggtaggcgccaaggtggacctggatatcgaccgtccggatccggtaaatccggagaaacgcctggagattaaggggctgacctgcaaagataaagaaggcgtcaaaacactggatgatgtagatcttacggtcaacagtggagaaatcctgggtattgccggaatttccggaagcggacagaaggaacttctggaagctattgcaggactgcagcctactgaaagcggaagtatccggtttacagacagcgacggaaatgtgaaagatctggcaaaaatgaattctgtggagatccaggagcttggcgtaagtcttgcctttgtgcctgaggaccgtatcggtatgggtctggtaggcgatatggatatgacagataatatgatgctgcgaagctatcacaatggcaaaggcggtcttctggacagaagagggccaaggcagcttgcctcagagatcaagaatcagcttgaagtcatgacgccaagtatttcagcgcctgtacgtcagatgtcaggcggaaatgtacagaaagtactggtaggacgcgaaatcgcacagaatccgaagattcttatggtagcatatcctacaaggggaattgatattaattcttcccataccatttacaaacttttaaatgagcagaaaaagcacggagtagcagtgatctgcgttatcgaggatctggacgtacttcttgctctcagcgacaggatcgctgtgctctgcggcggaaaaataagcggagttgtaaatggaagaactgccacaaaagagggaattggccttctgatgacaaaacatgaaaaaggaggggagcagtcatgaaaagagaacctttcttaaaaatggccaagcgtgaaaagatcagctggcagaaacggcttctgattcgttttattgcccttcttctgtctctgatcgtgtgcgcgggcgtgatttttttactggtaagaatgaaccccatggatgtatataaagcgatctgggacggcgctttaggttctgaacgccgtgtatggatcactcttcgtgatacgatggttcttctgtgtattgcaatcggtctggctccggcatttaaaatgcgtttctggaatatcggtgcagaaggtcagattctggtaggcggagcctgtgcggcagctgtgatgatctatgcaggggacagcatgtctccggtactccttcttattataatgtttgtatgcagcgcgcttggcggaatgatctggggaatgattcccggagtgttcaaagcatactggaatacaaacgaaacactgtttactctgatgctgaattatgttgctatgcagatcgttacgttctgcattgtgttctgggagaatcccaagggctccaatacggtgggaattattaatcagaccactcaggcaggctggcttccggaacttttcggacagaaatacggatggaatgtcctgatcgttcttgtatttacagttgtgatgtttatttacctgaaatacagcaagcagggctatgagattgcagtcgtaggtgaaagtgagaatacagcaagatatgcgggaatccgtgtaaaaagagtaattatccgtaccatggccatttccggcgctatctgcggtgtggcaggctttattattgtcagcggcgcaagtcatacaatttccactgcaacagcagacggcagaggctttacagcgattattgttgcatggctttccaagtttaatacatttatcatgctggcagtatcctttggcatcgtgtttatgcagcagggtgcagtgcagatcgcaactcagtacggattaaatgaaaatgcttccgatgtaatccttggaattattctgtttttcctgatcggagcagagttctttattaactataaggttgagcgcgcaaagaaataggaggaagatgcaatgagtgttcttattatttttattcaaaaagccattgtccagggcatctgtattctgtatggtgcgcttggcgagattatgacggaaaaatccggaaacctgaatctgggaattccgggaattatgtacatgggcggtatttccggccttatgggagcatttttctacgaaaaggataaccccaatcccaatgctctggtgggagttctgatctcacttttgtgtgcgtttgtggttgcatcccttggcggactgatctacagtgtcctgacgattacgctcagagtaaaccagaacgtaaccggtcttgcccttactattttcggtaccggcttcggaaactttttcggcggttctatttccaagcttgcaggcggtgtaggacagatttccgtaaaggttacaggaagcgcctatacagccaagattccgggattatctgaaattccggtgatcggagatcttttcttcagctatggatttatgacgtatctgtgtatcattgcggcagtagtcctttctgtatttttgtttaaaacaagatatggactgaatctccgtgccatcggagagaacccgggaactgcagatgcggcgggaatcaatgttaccaagtataaatatctttctacctgtatcggagcaggacttgcaggtctgggcggactgtatttcgttatggagtattcaggcggaacctggacagacaacggttttggagacagaggatggctggcagttgcccttgttatctttgccctgtggaaaccgcttaatgccatctggggtgcgtttctgtttggagcactctacatcctgtatctttatatcccgggactgggaagaagtatgcaggaagtatttaaggctctgccttatgtggttacgattattgttcttgtgtttaccagcttccgtaaaaagaaggaacaccagcctccggcaggtctgggacttccgtacttcagggaagaacgctaaaaaagtattgcaaatacatttatacggcagtataataaagcatataaaaggaaattcttcggggcagggtgactgtgatctgcatgatgcagaaagcggaattccctaccggcggtatagtccgcgacccgctatgagcggttgatctggtgaccggaagcatccggaattccagaaccgacagtaaagtctggatgagagaagaacacgcttgtttttacgtgctcagtgccccgggaatatttcccggggttttttgcgcagcaggaaatcagtacgcaacctgagaggaattttctttgagaagaaggctgttattcaggaccttcaaaaaagaaaaggagagataaagtatgagtgaacaggttttaagaggtgggaatgtaatggagagaagtcggacaaggacactgacacagattgctatgctgggagctgtggcaggagtactgatgaactttgagtttccgattccgtttctggcgccatcgttttatcagcttgatttttcggagatccctgttctgataggaagctttgccatgggacctctggcaggtgtggtgatcgagctggtgaagattctggtacatcttgtgacaaagggaaccatgactgcaggtgtgggtgatgtggcaaactttatttttggctgtgcttttgtgattccggcaggcctaatctaccgtttccaccatatcaaaagcagaaaacatgctgtagagggaatggctgtaggaacagttcttacaactgcggccgcttgtctgatgaacgcttttgtacttctcccggcatatggaaaagcttttggaatgcctgtggaggcatttattgaaatggggacagctgtaaatccttctgtaaacagtctgcttggatttgtggcaatgatcattgttccttttaatctgtttaagtatacactgacttccgtgatcgtgttttttatttataaaaggatccgtgttattttaaaaggcgactgaaaataatattgaaataaaaagaaaacaatcagggctgaggctttggttgttttccttttgggaagaaagaaggagggtttgctatcaaggtatattttcatcttccaggattgtttgaattttacgaactgtatcagatattttttccgttataccgcaggcacagagaatacttttatgactggtgtgagataggctctgtatacggagctccggcagattgtatctggggcggcggccgtgtaggagagggaaatcatgatccgcaggaggttttggccctgatgcaggaatatgggatttcagcccgactgacattcagtaattctctgctcaggcaggaacatcttttggataaaaagtgcaatgctctttgtgaagtgtttgcaaaaaagggacaaaatggtgtgattgttcattcagacctgcttctggaatatttaaaaataaattatccggaactttattttgtttcgtctaccacaaaggtactgacagattttcaattatttatgaaggaagtcaaccgggaggattttctttatgccgtaccggattttcgtctcaataagtcttttgataaatggaaaattctgtcccagagccagaaagacaaggtggaatttttatgtaatgaatgctgctggtttggctgtacagacagaaaaagctgttatgagactgtgagccgtaaaaaccttggagaggactgtccggagcatcactgtgcggctccggatgcaggaagtggttaccgtttttcaaaagcaatggaaaatccaggatttatcagcattgatgacataaaaaatgtttaccttccgatgggattttctaattttaaaatagagggacggggacttggcagtgctttgattctggaatttttgctttattatatgacaaaaccggagtatcatattcatataagagaaaaaatatatttagacaacatgctggatttattttaaaggagaaaattaactatgggaaagatacatcatgtagaaaaacttaccgacaaccgttttgtcaatctgtatcatgtggatgcaaccagtgtacatactacgccggtatcttactttgtggcatccagagcgaaagcagtcagtgaactgaaactgaaaacaggaaaaaacgatccggacggcgttatcatctacagcctgttcggggagaaaaaagacagagtggtgctgatccgccagtatcgctatacccttggcggatatgtatatgaatttcctgcagggctggtagagccgggagaagatcttcatgaaggggcagtccgtgaaatgtatgaggagacagggcttgtctttactccactgcatgtgaatccggcctttgaaaagccttattttactaccgtagggcttacggatgaatcttgcgccaccgtttacggttatgcttccggtgagatcagtaaggcagcccaggaggacagcgaggagattgaggtggttctggcagatcggaatgaagtaagacgcatcctgaaggaagagcgtgtagccatcatgtgcgcttatatgctgatgaattttctgaaagatgaagaaccgttcgaatttctgaatgaggaaatatagcttgacaaatacgagaaaaacatgctatagtttttatggttataaaagctatagtgtgttactctttgggaggcattaactatacataacgagaagtgtttatgtgtagtagtgtctttttttgtacaaaaaaccggttgaaacaggatacagctgcgtatactcacttcttagatgataataaaataagaaggagtaaagtaagaatgaaagacaaaattttcagtgttcttcagcgtataggacgaagctttatgctccctatcgccatccttccggtagcaggccttctgctgggtatcggaagttcgtttacgaacgcaaccactattgaaacttatggattaacaaaaattctgggagatggaaccattctccactatcttctcatgattatgaataaggtaggaagcgctgtttttgacaacctgcctttgatttttgcagtgggtgttgccattgggatggcaaaaaaagagaaagaggtttccgctctttctgcagtaattgcttattttgttatgaatacagcaatcaacgccatgcttatcaacaacggactgattcttgaaaatggagagattgcagaatctgtccttgagggaacaattacttccgtctgcggtattcagtctcttcagatgggcgtatttggaggaattattgtaggccttggagtggcggctcttcataatcgtttttatagaatccagcttccaagcgcattgtctttctttggaggaacaagatttgttcctattatttccacgatcgtatacatgtttgtgggaattttgatgtattttgtatggccggcagttcagaatggtatttttgcactgggtggtcttgtgacaggttccggatatgcgggaacgctgatctttggtctcattaagagagcgctgatcccgtttggactgcatcacgtattctatatgcctttctggcagactgcagttggcggcactatggaagtggcaggtcagatggtacagggtggacagaatatcttttttgcacagctggctgattccgcaaatattgcacatttcagtgcagatgctaccagatatttttccggcgagtttatttttatgatctttggtcttcccggcgcagcgctggctatgtatcagtgcgcgaagcctgaaaagaaaaaagcagcaggcggtcttctcctttctgcagctctggcatgtatggcaacaggtatcacagaaccgctggaattttctttcctgtttgtagcgccggctctttttgcagtacaggtgatccttgcaggttctgcctatatgatcgctcatatgctgaatgttgcggtaggtcttactttttccggcggatttcttgactttttcctgtttggtattcttcagggaaatgaaaagaccagctggcttcgagtaatccctgtaggtattatctacttccttttatactattttatttttaaattcatgatccggaaatttgatttcaaaactcctggacgtgaagaagacgatgtggaaacaaaactttatacaaaggcagacgtgaatgccagaaaagctgcagccggagaggtacaggcttcagacagtgaggatccggtcagcgaggcgatcaccagaggccttggcggcaaaaagaatatcagtgatgtggactgttgtgcaacaaggcttcgttgtacgatccacgatgcttccagggtcaatgacagcatcctgaaagcaacaggagcttccggcgtagtccataaaggaaatggagtgcaggttatttacggaccaaatgtgacggtgattaaatctaatctggaggattatctggaaaaagctccggatacctatgcagaaacagaggaagcaggagaaacaaagcaggaagaaacaaagaatacagaaacagagaaaaaggttgtaaaacgcatcgtgatctccagccctgttaccggaatggcagcggatctgggaacagctcctgacgaagcttttgcacagaagatgatgggagacggcgccgtagtaacacctgaggaagcatttgtatgtgctccggaggatggagaagttgcttttgtatttgacacaaagcatgctattggatatatgacagattccgggatcagcctcctgatccacgtaggaatcgatacagtaaaattaaatggagagggatttgaggttctggtggaaaacggacagaaggtaaaaaaaggtcagcctatgctgaagctggatctggattatctgaaagccaatgcgccgtctctggcgacgccggttctctgtacggagcttgaagacgatcagaggatccgtcttctgaaagagggaccggtgaaagcaggagaaccactgtttgaggtggaagtgctgaactaggatccgatggggaaagatacggatgatgtacaggatagtgaaggttttaaatcataatacatttattgggattcgaagtaaagataagtgtaaatgtctgatcatgggaaagggcattgctttcggcagaaaggtgagcgaaagtatttccgtgggagaagatgcaaaagtctacacgctgacggaacttacggaaagaggatcagcagaagagatcattcgctccgttcctccggagtgcctggagctggcaggagagatccttgatcatgcagaaaaagtatttggtcagattgatcgttctattttattccctatggcagatcaccttgcttttgctgtacagcgtatccgaaaccaggaacagattagtaatcctcttacggaggatatacggattctgttccatcaggaatacaaggttgccaagtgtgccgaacagcttctcagggaaaggcttcatgtggaaattgatgagcatgagatcggatatattgcccttcatgttcatgcagctatcgaagatcagaaagtttcccaggccatgcagctgaccagggcggtaagagactgtatctctctggtagaaaaacagacagggaccaccattgacgtaatgtctctttcttataacaggctgatgaaccatatccgttatatggtggcccgcgctctcagcggggaaaaactgaaggtaaatatgaacgattatatttccatacgttttccaaaagcattcgatatggcatcccaggtgtgcggagaaatgatgaaaaatctgaagatctgcctggatgatgtggaggtcggatatcttgccatgcatctggaacgtgtgatggatacggaattaaagtaagtgttcatgcggctcgttgctgtaaaggtcgtgaacagcaacgaattgaatgatgatatgcagagtactttttaaaatactatggtaaaaaagatagatataatgtaaaataaaacaaaaaacaaaaaatggaggaatatcatgaaatcatttgagtacacaattaaagacgaactgggaatccatgcaagaccggcaggacttcttgcaaaagaggctaaaaaatacagctctgtatgtatgatcgaaaaaggtggcaaaagcgtaaaactttctcagctcatgatgctgatgtctcttggtgcgaaacagggagatcttgttaaggtgactgcagagggtgaagatgaggatactgctattgcagaactggagaaattctttaacgaaaatctctaatcacaaaatatagaagccacaggtcagggaggaaaaaagtatgcagagtttccagggaaaatccgtatataaaggaattgtaatgggaccggtagtcgtcctcaaaaagaatgattatcaggtaaagagatccaggatcgaggatgcagatgctgagaccagccgtgttcaggaggcagtaaagcgttctcaggaacagcttcagaagctttatgacaaggcactgaaagaagtcggagaggcaagcgcggctatttttgaagtacatcagatgatgctggaggatgaggattatctggaggctattcagaatatgatccagacagaaatggtaaacgcagaatatgcggttgcagtaacaggggataacttctctcagatgtttgcatctatggatgatgattatatgaaagcccgtgcagcagacatcaaggacatttcagaacgtctggtccgcaatctgagcggacaggaagatgcagacttaagtgacatcgatccgtctgtcattgtagcggatgatctgagtcccagtgaaactgttcagatggataaggaaaagatccttgcttttgttacggttcatggttccaccaactctcatactgcgatccttgcccgtatgatgaatattccggcgctgatcggagttcctcttgcacttgacgaactgaaaaatggtacgactgcagtagtagacggatttaccggacaggtaacttttgagccggatgaagaaactcaggcagccacacttaaaagagttcaggaagaaaaagagaaacttgctcttctgcaggaactgaaaggaaaagaaaatatcacacttgatggtaaaaagatcaatatctatgtaaatatcggaagtgttggagatatcggctatgttctggagaatgatgcaggcggtatcggacttttcagaagtgaattcctgtatttaggcagaaatgattttcctacagaggaagaacagttccaggcatataagcaggttgtgcagactatggccggtaagaaggtcattatccgtacccttgatatcggggcggataagcaggtggactattttaatcttggaaatgaagagaatccggcactgggataccgtgcgatccgtatctgtctgaagcagccggatatctttaaaactcagctgagagctcttttccgtgcagctgtatacggtaacctttctatcatgtatccaatgatcacttctgttgaggaagtggaaaagatctatgagattgtgaaagaggtggagatcgagctgaaagcccaggaaattcagtacaggattccggaacagggaattatgatcgagactccggcagctgttatgatcagcgaccgtctggctgagatggtagactttttcagcatcggaacaaatgacctgactcagtatactctggcgatcgaccgtcagaacgaaaaactggatgatttttacaatccgcatcatgaagcagttctgcggatgatacagatggttgtagacaatgcacataaatgcggcaaatgggcaggtatctgtggggagctgggcgctgacctgactctgacagagaagtttgtccgtatgggactggatgagctgtccgtggctccgtccatgattctgaaactccgcaagatcgtccgggaaatgaaagcagaagactgaatatagagattgttaacaggtatcgaagccagatatttttactatatgttaatatctgtcataaaagctttttgcgagacatcggaactgtgttccggtgtctttttgcagttaatatttcggatatgcttatttattgtatgatttcatattatatgaaactgagatttataaaaacatatgtggtaagagtaaatatgcctcgagattcttcgacaaaacttgacaggattctccatatgaaatacaatgttccctaactgaaaagggaatttgcagaaaaggagacaaccatggtctattcgttttatcaactgctctggctgtacatgatctattcatttataggctggtgcggagaagttgcagtggcagcagtaaagaggcatcgttttgtaaacagaggggcagtcagcggtcctttttgtccgatctatggtctgggagctgctgtggtggctgtattctttccggagcttaaaggaaatccgctttttctgtttttgggcggaatggtagtcaatacctttgtggaatatgtgacaggccgtattatggagatgagccttcataaaaaatggtgggattattcagaccagaaattcaatctgggaggatatgtatgcctgaaaacctcggttctctggggaatttgtaccgttcttatgatttatgtgctgaaccctgtatttaccggacttgtgggactgattccaaagctctggggagaaattatcctgtgggtgctttttggcctgcttattgtagattttattggaacagtgattgctgtctgggggctgaaaaagaaaaacggtcggatcgatcagatcagagaaggccttggacgtacttcaaagcttcttgaaaataccatgaccagacggcttcaggcgcgtatgatcaaagcgtatcccaatcttgagaaggaagaaaaggaggatgtctttgcttccggatgtggtttctataaactggcctgcctgttttttatcggagcctttctcggagatattacagagactgttttctgtcgtttttccatgggaagatggatgagccgcagcagtgtggtatttgggccgttcagtattgtatggggacttggctgcgccatgcttacctggatcttgtacagatacagggaacaaagtgacagaaggctgtttctttgcgggacgattctcggcggcgcctatgagtacatctgcagtgtgtttacagaaattgtgtttggaactgtattctgggattacagtaaaattccctttaatctgggcggaaggatcaatcttctgtattgttttttctggggatttgcagctattatctggatgaagggtatttatccgtttttgtccagatggattgaaaaaattccggtacggattggaaagcctttatgtatgatcatggttttttttatgagcgtaaatatagcactgtccggactggctcttgatcggtattccaaaagacatgatggccttccggcaaaaaatgctgtgggagagctgatggatgactggttcccggatccttatatggaaaaggtttatccgaatattaaattcaggtaggataaaagcccttttgtgtcggcagaaatgcagacatgaaagggcttttttggcagctttatttctttttcttttccagatattcattcagagtggcattggaaatgtcagtgataaacatatggcctggcgcgtgagtgataacaatgggcggctttgcattttcaacagctgcctgaggtgtgacaccgcagggccagaacacaggaatctctcccgggtagatatctacagcctctccgtagtccgggttcatgatatcggtaacgccgattgcttccggatctcccatttgtacaggggcgccatgaacatttggcattttttcagtgatctcataggctttctttgcattttccggagtcattggacgcatggagcataccataggcccggaaaaaggtccgacagggacagtctggatactggttttaaacatggggacattccgcccctgcgcaatgtggcggacttcgattccttcacggatcagcgcctcctcaaaagagaaggaacagccgatcagaaagccgacatatccttctttccagtattgagatgcatcagtgatttcctttgtaaatactccgttttcataaatgcggtatctggggatatctgtgcagatatttccgccttctcccatgtcgtgagtttcaggagtgcctttgatgatttccagaaccggacagggaaagggattttttgctgtaaattcttcaaaatctgctgcatactccggcggcagaataacaagatttgcctgggcataacccctgcacattccggctgtgggaaaatcaattttaccctgtctgatcagactgcggacttgtgagggggccatatctatatatggtgtaatatcaaatgccataaaagagtcctccttttttacgttaatgtataaaaatactatacaggaaaataatggaaaatgcaatcctgtgttgtcagggagtgttgatgtggataagtcaggtatattaataaaagattggtgcataaaataaaaagaaagcagcagaaggcggcagttatggcagaccagaagcttgataatcttttaaatctcgccttagattctacagaagaggaacggaaaaagtcagggaatttgaatatcggatacgaagaacggtccggaaactgggatatcatagtaaaatatagtggtgatgcagaggcattgtcaggagaaagaatccggacagtgcctcttttgggtggatatgcagtggtgaatcttccggaagaagagattcaggagtttgcatcaagaccacagatagagtttgtagagattccaaagcggttgtattttcaggtgaaccaggcactggatgccgcctgcatccgcccggttcaggagggatattttccgggagctgtgcagacaggaaacacagtgggcgatgtacccggacagacaatcggtaatattacggagaatcaacaggggctttccgggcagggagtgcttgtgggaatcgtggactccggggtggactggcagcatcctgatttttgcaataaagacggcacaagcaggatcctgaggttatgggatcagagtcttctggcaaagcccggagaagatcccccggagggatatgcagcaggagtggaatatacaaaaacagatatcgacagggcattgagactttccggggcagaaggaaaacaaattgttcgggaacaggacttcagcggtcatggaacctctgttctcggaattgcggcaggaaatggcagagcttccggaggtgtgaaccggggagtggcttataccagtgatattattgccgtaaaaatgggaatgcccggagagaattcttttccaagaacagcagagctgatgcagggagttgattatctggtccggcaggcggcagagcttggaagaccaatggctgttaatatcagctttgggaataattatggctcgcacagaggagattcgcttctggagacatatttaagcaacgtatctgatgcaggaaggacagtgatctgcgtggggacgggaaataatggaaatgacagcgttcatacagcaggaatcctggaaacaggtatgcaggcagaaattccattcagtgtcagcccccgggagccggtacttaatgtacagctgtggaaatcttacgcagatgaaatagaaatttctcttgtgactccttcaggagaaaggatagggcctctgtctgaacagattggaactcagagatatcaggccggagaaacagagcttctgatctattatggaaaaccaggtcctttccaggtgactcaggaaatatattttgactttattccgagaggagcttatattacaggaggtgtgtggaaaattcagcttcggggacgaaggatcaaagacggcagttatcagctttggctgccggggggaagggttttgaatccggcaaccggattttattatccgaaggcagaggaaacgcttacgattccctctactgcagctaaggtaattacagtaggagcctatgattccagactgaatgccccggcagatttttcaggaagaggcgggggcagccttttttatccaaagccggatctggctgcgccgggagtggaaattacagcgccggttcccggcggaggatatggaaccgtaaccggaacttcgtttgctgcgccttttggtacaggctcggcagcgcttttgatggagtgggggatcgtcaggagaaatgatccctttctctggggagaaaaggtgaaggcttatttaagaagaggcgcgcagcccctgccgggatttaataaatatcctgataatcaggtggggtatggatgtctctgcttagaaagcagtttgccggattaaaatattgtatttgtaaaaaatgtatgctacgatatatacacaatgtgtaaaaagcgaggagaatatggaaataaaagatataataaaagaattacgggaaagtacaggaatgaatagaaaagaattttgtgagtattttggtattccttacagaactgtaacagaatgggaaagaggaacaagaaaaatgccggattatgtttttagattattagcatacaggataaaaatggaaaattttgcaggaaaggaagaggtggatgaagaataggataattaatgtacaaaatgttccaatttcaatttcaaaacaagaactggatgattatatttgcattacagatattgcaaaagctaaaacaggagaatcacgtagtgcagatgttgtaaaaaactggctgcgaaatagaaatacgttggaatttttaggaacgtgggaaatgatttataatcctgattttaaagtggtcgaattcgaccactttaaatcagaagcgggtttacatacatttgtattaagcgttgcggaatggattaataaaacgaatgccataggattatatgtaaagcgtggaaaatatggaggtacatatgctcataaagatattgcctttgaatttgcatctgcaatcagtccggtttttaagttatatttgataaaagaatttcagcgcctgaaagaaaaagaaaataaatcaagacaaatagagtggaatgctaaacgttttctgactaaaaataattatttgattcagacagacgcagtaaaaaactacttacttccgcagaaggattataaagaaaatttgcaatggctggcatatgcagaagaagccgatatattaaatgtggctttgtttggatttacagcgaaagcatggagagaaaccaatccaggattggcaaaaaagaataatgtcagagattttgccgccattaatgaattgacggtactttctaacctggaatctcataatgcacagatgattaaagaaggaaaagggaaagaagaacgatttaaaagtttacaggaaattgctgaatatcaattgaatgttctgaatgcagcagagcagataaaaaaaatagaagtttgtgacaatgacataacatcctccccacctgctttgtaacaattatataacgtcctctatacagaaatatgcggttttaagccattttcgtggcaaaaaaccgcatgttttttcgtcatgcgtgcaaaaatccgtccggtggacgaattttttttgtagcaatgacttgacatccccgggggcgttgtgtacagaccaaagtctccctcatatgtgaaagtttaaatgaattcatcccggatgcgcagttcttgtggaatatgcacagatgaaatacatccaaacatttctttccgtattgaaattcaaacacctcataggggcttttgtttcccagtttctttcttgcataggaattgatatgactcatcataaggtcaatctgttcctgcgtgtattgtccgatatattctccttttggaataatccggcgtatcatctcatggttgttttcgcaactgcctttttgatagggggcactggcattgcagtagaacatccttgtgcgaagctttccctgggaatcgcattcgatagcggaaggattggaaaattcgcttccgttatcagccaacagaagtgggaacagttccatgaagatgtcgggcctgagttccagatagaggcggttgaaaatatcaatgaccgactgggaatcatttcgtttccggagaaaagcaagctgtaattcctgttccacgaaatggatggtgagaagaacagcgccgcctttcaggccttctacagaatcaatctgacgaacggagagatccggatgttcttttgtataggcctggaaacaggaaaaatcacgcccttcacggcaggccttgtccaccttgagatttctggaaacattttttctgggacgcatccggactgttcggggcatgtcaagatttctggcagtaaagagtccgttgtttacataggcatagagggttctttctgacttcataagctcatctgcatggtggatagcgatgtgatgaagggattgccctttaatcagaagcggggaaacgatgtcatccatctgtttcagctccgttggggagagggcaaaaccggctctggattcgctcctgaccagttcatactctttttgagcataggaagcctgatagagatgtttttccagagagcatttattgcgggacggacagccgttgcatacatagggcggcctggaaagtctggggcagatatacttttcgtagaggatacaggaagaagtacatttgccgcaggaccagcagagccggcctttgcgaaaggaacattcccgacataccatttgagcagagcactgatgcagaaaggcgagacggcagtcgttgaatgccctgccataagcccagcttttttcaaagtagatgtggtttttcacttctttggagatggtggtacaatccttatttaagaacctaccgatggatttaaagctatctcctttattcaacatggtttcaatggtgatacgagaggtaagggttaaatgtttttgtttattcataaggacttccttcccgccgggcagaagcagccatgtttatagaaagattttagcagaaagtttggaaagattaaattccatagttgagggaagatggatttgtaagattaaattccacagaggggtggaatttaaatttgcaagtaagtaaaagcaaaaaattaaaaaaatataaatttcctcttgcaaaataaaaacaagtatggtattataattttcgctgaggtcagtataaatgattacagcgaaaaataaggctccatggtcaagcggttaagacaccgccctttcacggcggtaacaggggttcaaatccccttggagtcatttgaaaaataaaaaatgagattttctttgacttgattccgacatttggtgtataataatttttgtaagtattacgcgccgatgtggctcaattggcagagcagctgatttgtaatcagcaggttatcggttcgagtccgatcatcggctttttggacctttagctcagttggttagagcaaccggctcataaccggtcggtcctgggttcgagtccccgaaggtccatttttgtttttttggcccagtggctcagttggttagagcgccgccctgtcacggcggaggtcgagagttcgagtctcttctgggtcgttatatggggtcttagctcagctgggagagcatctgccttacaagcagagggtcataggttcgagccctataggccccatatctttttttatataacatgccgcagtggcggaacaggcagacgcccgggacttaaaatcccgtgggtagtgatacccgtaccggttcgattccggtctgcggcattgatgaaaagtgggagaaacgttgaatttacagcgtttctctttttttagctattttatatataattctgttagttgtaaaaaattataaattgagctatactgttcaccagtatattgggagaaaacagagaaataatgaacgagaaaggatgtttcaaatgaacgacaacaaaagttttctgggaacagagccaatcggaaagcttttgatgaagctggcgcttcccacagtagcggctcagctgatcaatatgctttataatattgtagaccgtatttacataggacacattcccggggacggagcgctggctctgaccggtgtgggcgtctgtatgcccattatcatgatcgtgtctgcttttgcagcgctggtaggcaacggaggtgcgcccagagctaccatttatatggggaaaaaggatactgacactgctgaaaaaattttaggaaactgttttaccgcacagattataatttcagctgtccttacgatggttcttctgatctggaacagggatctcctccttgcttttggcgcaagtgaaaataccattgattatgcagtggcatatatgaatatctatgcttttggaactatttttgtacagcttacattgggaatgaacctgtttatcacagctcagggatttgcaaaaacaggaatgctttctgtacttcttggagcagtgacaaatattatcctggatccggtatttatttttgggttccatatgggagtaagaggcgctgctcttgcaacgattctttctcaggctctttcctgtatctgggttctttgctttctgtttggtaaaaagacgattttgaaactgaagaaaagatatatgacggtcaaaaaagagattctttttccctgtctggcattgggttcctctgtgtttatcatgcagtccagtgaaagtgtgatctctgtgtgcttcaattcttcgcttttgaagtatggaggagaccttgctgtgggagctatgaccattcttaccagtgttatgcagtttgccatgcttcctcttcagggacttgggcagggggcacagcctatcatcagctacaattacggagccggaaataaagagcgtgtgaaaggcgctttctggctgcttttaaaatgcagcatgttttattccgtactgttttgggcagttgtcatgctgttcccgcagatgtttgtaggaatgtttacctccgatgcagtgcttgcagcgttcacccgggatgcccttaaaatttatatggcagtggtggggctgtttggtatccagatggcatgccagatcacatttggtgctctgggaaatgcaaaagcctctattcttgtggctgttatgagaaaatttgtgctgctgattccgctgatctatattatgcctgcgatttttacggcagataaagcaagggcggtttatatggcggagccggttgcggatacactggcaattacctttaccgggtttttgttctttttccagttccgtaaggttctgagacagatgaacaaaaatacagaccaataaaatgtaaattggacagaaatacaaaaactctcagattttgggaaattttttccgaactctgagagtttttgtcagtcagttgttttgcggcggatcagaacaggagtgatctgcttatgaacaggagtttttaaaggagaaggtttcctttttttcatttcatccatctgagagaccagcagctccaatgcagtttcagcaattttgtcgatctgctgaccgatggtggtaatgggcacgatagcttcatttgcaataggagagttatcaaagcccacaagacggtactgctctggcagatgtccatatttctggatgataagattcagaaatatatttgcataagtatcgttggcgaaaaaaattcctttttttctgtcaggatattttttttcgatagtttcaaaagtttcttttatccggtcaaaggttgtttcataagtggagccaagatcgcccagcatgagttcgtatggtacatgatacttctgacaggtatcttcaaaagcagtgatacggttatgagccggaacattttcgggtacgggaacattgatgtggatcaggatatcgcagtggtttcgtatcagaaggctggttgcctgcagtccgcccatatagttgtcagtatccacactgcagatatgttcggcttcccgctcaatagccacaacggggatattgcattttgccagttctgtcgaggaaaaagtgtggctcagaatgatcagaccctcaattttataagccaaaagctcattgatatactgctgctcccgttctcttccgtcattgctgacaaaaacaagaaatttatagccgaattttgagtaactggacaaaagctgatttaagatttctgaataataatggagatagagattggggatgatgatcccgacaaattcgctttttccgttggcaaggactttggccagtttgttttcctgatagcccagttcttccagagctgcggctattttttcctgattttcaagggtcagtgaatccgggttattaaaatatctggagatcgttgtttttgaaaaatttgtgtaagctgcaatatcagcaaatgtcactttttttttcgccatgattctgtactccctgtatttattatatggtgattatgttatgtcagacacgtttttatatggatatttacaagtataacaaggaagatataaaaaatcaatctaaaaataactggttaagtaaccggttattttttagttccaatctattgacagacagaaaaaagtgatgtattatcaaaataaagtaaccggttacttaaccggttataagatcgaaaaagaaaacggagggaaatggagtgaacattttagcgaaaaagaaaacgtcacctgtcaagcgaacggcaaaggataagctgatgtatgtaaaaaagaactggcagctttacctgttttttcttatgccggcactgcttcttactatcattttcaagtatcttcccatgggcggagtgctgatcgcttttgaagattataacgtcattgacggcattctgggaagcgaatgggtgggactggaatacttcaaaagattcctgtcatcgccggattttatggaatacctgatgaatactctgaagctcagtgcatttggtctgctttggggatttccgattcccattatcctggctttattgttaaatcgtataagacgtgagggaatacgaaaaaagattcagctgctgatctatgcgccgaactttatatctgtcatcgttctttgcggtatggttcgtatgtttctctcgccggtaggccctattaattccctcctcgggattgatacaaactggatgacaatgccttcagctttccgtacgatttatattgccagcggaatctggcagacagccggatggtcatcgattatgtatacggctgctcttgcaaatgccagcaaagatctggaagaggcggcaatcgtagatggagcaaatatcttccagcagatacgatatgtagagcttccggcgattaaaaacatcattgtgatccagttcatcctgcaggcaggaaacattatgagtatcggatttgaaaaagcttttgcattacagacggacatgaatcttccggcatctgaaatcctttcaacatatgtgtatcgaatgggtcttcttaatggagattacggatattctacagcagtaggtttatttaacgctattatcaatgttattttactgatcgcagtcaactgggttgtgaaaaagttaaatgatggcgaaggtttataaagaggaggaaagaaatggaaacaagaagaaaaatgaaactcggaacatctgataaagtgattctgggaatcggctatactgttcttggcatttttgttttatcaatactgatccctcttgtatatattctaatggcttcctttatggatccaaatgtactgaacagtcggggaatcagcctgaattttaaagactggacgctggatgcctacagacgagttctggagaacgatatgatctggcgtggatttttcaattcatttttttattcagcggcatttactgtgatttctgtgtttatcacgctgctggcagcttatcctatgtcaaagaaagaatttgtaggaagaaaattttttaatacaatctttcttattacaatgttttttggcggaggaatgattcctacttttattttaattaatcagttacatatggtaaataccatctgggcgattcttcttccgggagcattcaacgtatggaatatgatactggcaagaacctattatcagtctattcccaaggaactgcgggaagcatcttctattgacggtgcaaatgagatccagcatttcttcaaggtaatgcttcctgtctgcaagcccattattgcagttctggcattatggtcatttgtaggaatgtggaacagctattttgacgcaatgatctatttaaacgacgcagagctccagcctctgcagcttgtattaagatcgatcctggtccagaacacgcctcagccgggaatgatagcggatatccagagcacggcggagatggcaaaggttgcagaacttctgaaatatgctactatcgtagtatccagcctgccgcttctgattatgtatccgttcttccagaagtattttgataaaggaatcatggttggttctgtaaaaggttaagggggatgtaaagcatgaaaaaaagaataaaaatgctgatagcggcaggtctttccgttgtgatgcttgcttctgctgcaggatgtggaaaaagagagcgtatggaagcagagatcaatccggatactcctgtatcagaggttttgtttcctttgaaggagcaggcggagttgtcctttattacaaatgcaccggcaacatcaacacaggatccgaatgaaagggttattttccagagaatggaagagcagacaaatgtgcatattgactggacctgctttgttgcagatcagtttgcagacaaaaagaacctggctctggcacagtttggaaaccttccggatggtctgttcaatgcaggaatgaatgattatgatcttctgagatatgcaaaacagggaattatcattcccctggaaaatctcattgacaaatatatgcctaatcttcagagggtattcgaacagtatccggaatacaggacaatgtgtacagcgccggacggacatatttactcattcccatggattgaacagctgggggcaggaaaagaggctattcaggcaattggaaatattccctatatcaacaaaaaatggctggattatctgaagctggaagtaccgtctacggtggatgaactgaaggaaacactgattgcctttcgcgatcacgccgcagaactggaagaggaatttgagattgagggcggagtgattcctatgtcctttattataaacaacggagatcaggatccgtccatcctgattaacggatttggagagggctatggtgatacgggggatcattttgcagtgacagaccagggcgaagtgatctacaccactgtacaggaagggtataaggaaggaatccagtggcttcaccagctggtagaagaaaagctggtagatccggaagcctttactcaggagtggtctacatatgtggcaaaaggtaaaaatcaccgttatggtctttgctttacctgggatatttcgaatattgataattatcaggattatgtgatgcttccggctcttgccggtccggagggtcttgttaatgtcacaaggcagaacaacagtgagaccagcggttttgacagaggacgctgtgtgcttaccaccagctgcagaaatacagctctggcagcagcctggatcgatcagatgtatgcacctctccagtctcctcagaataactggggaacttatggagaagaggattcctttaatatttttgagatggcaacaaataaagatggagagcctatgctgaagcatatggatctgggagatcagtccccggtagaggtaagggaggctcagtcagtaaacggacctcttgccatactgaatgaatattatgatgtatatgtgacacagccagatgatgccaaatggcgtctggataacatgcatgaggtatatttgaaggacatgaacagtaaatacgtttatccaaatgtatttatgagcattgaggacactaacaagatatctcagtatgatacagatattaagaaatatgcagaacagaaaaaagcggactggatcctgaatggtgggattgaaaaagagtgggacagctatcttgaaaaaatggagcagtatggattgtcagattatctggccatcaaacagaagtattttaatcagtatcaggaaagcctgatggaaaatcagggagatacaaagtaaaaaatatatagcgatacaggagtttgaaatgagcgaaaaattaacaaaagcaactcaatttcaatatgaacagatgaatcagatgccaaaaggagagaaacctgtttttcatgtttctgctcctgcaggctggatcaatgatcccaacgggttctctgtatataaaggaaaggtgcatctgttttatcagtatcatccatattccatctgctggggtcctatgcactggggacacagcgtaacggatgatatgataaaatggaagacagagccggtggctctggcgccagatcaggaatatgacaaaaaaggatgcttttccggaagtgctgttcaggcaggagacagacatgtgcttatctataccggagttacagatgaggaaaaatctgacggaagccgggaagaaagacaaaaccagtgcattgcctttggcgacggagtaacctatgaaaaatcaccgcagaatccggtaatcaccggggatatgctgccgcagggatgcagtcagattgattttcgtgatccgaagatctgggaagaagatgggaaatattatctgatcgtggggaataaaagcgaaaaatataaagggcaggtggtgctgttttccagctcaggcctggaaaaatggaaatttgaaactattctggctgaaaacacatcaggaaaaatcggatgcatgtgggaatgtccggacttttttgaactgaatggaacccatattctgatatgttctccacagaatatgacagcagagggacttgagtttcataatggacacaattctctgtatttttctggaaagtatgagaaacaaagccacacctttataaaagatgaacccagatcactggattacggactggatttctatgcgcctcagacaacctgtcttccggatggaagaagagtcatgatcgcctggatgaagtcatgggattcctgtgtgattcctgacggacaaagctggcagggaatgatgacgctgccaagagaactggaatatgtaaacggaattcttttccagaaaccggtaagggagttggagaaatatcacaaaaatcctgtttactataaagaagcggaaatcaaggataaaacagaacttccgggaatccggggcagaatactggatatgacagtggagatccccgagggagactatgaagagttccggatcgatcttgcacataatgagtcttatacaaccagttatacatactacaggaagcagggaatactggaaacagacagaacctattgtggaatcaacaaagatgtagtgtgccagagaaaaatgaagatacgtggtacggaaaaagctctgaaacttcgcttcatactggaccgtcagtccatagagttgtttgtaaacgagggacggcaggtaagtacaacggcaatctgtacgccgcaggaagcagaacggattgtattttcatgcgacagaagtataaaagtaaatatccagatgtacgaaatagcataataaatataaaaatctcagatttcagggaaaaggcatcctggaatctgagattttttattattatggaacaaggtgtgttttatgtgttcaggcatcctccgccagtatagttccgccgccaagtaccgtatcaccgtcataaaagactgcagcctgaccgggagtaacggctctctgaggctcctggaaggtaacgcggatccggttttcgccgatctgttcgatggtggctggctgttccggctgacggtaacgggtttttaccttacactggacagggccatccagatgatcccagggaatcagattaatatcccccaccagacaggaggaggacataagatcatccttcccgccaaggatcacctgattgtctttcagggattttgcgcagacgtaaagagattccggtgcagaaatgcccagacctcttctctgaccaattgtgtaatggatgtgtcctttatgggttcccagaactttcccttctttgttgacaaaatctccgggtacggaggtccgtccggtatattcctcgataaaggaagcgtaatcgccgtcagggacaaaacagatatcctgactgtccggcttatctgcgttgataaagccctgttcctgggctatctgacggatttctgccttggtataggttcccagggggaaaagtgtatgggcaagctgatcctgagtcatggaataaagtacatagctctgatccttggtatgatccagtccttttttcagaagataacggccggtgtccggatcctgttggatttgtgcgtaatgaccgctgacaatataatctgcacccagttcctgggcttttttgatcagggcatcgaatttaaggaagcgattgcagtcgatgcagggatttggagtacctccgtttaaataggtggatgcaaatttatcaatgacgtggtggcggaattcctcatgcatgggaaatacataataaaggattccaagtcttgctgctacatttctcgcatcctctgtatcagagggagtgcagcaggaacggtcgcctggctggctgcactgaggtttatcataaagcttcatggtagctccggcgcagtcatatcctgcctggatcatcaggtaagcagctacactggagtcaacaccgccgctcatggcaatgattgcttttttctgcatggaatcttctcctttttcttttgctgtggctatggtatcattatcaacctatgatgtcaatatgtaaattgtcatgtataaaatggatatataaatttttagatgcgaaagaagaacttctgacagaatgcggaagatatagacgaaaatacaggaaaattatggtttctttatagattttataattatattagaaattatacaaactcttatcacaattatgttgtatgctataagtgtcttaaaggtaatcccctttaagaacaggcagcacttcaatgccggaagagctgccgaactctttcctttccctaaaaaaataaaagaaaacaatgacagccgcccacccggcaagatcgtcgggagagcggcagttttcttgtttatgcggaatatgactgcccatgacagtctgcatctggcgcgcaaagcggaatttgtctgctttgttcttctttttgttatggccttcgataacgattaaaacaggagtagatttcctgggctcttggagaagcataaccgcaggagatataagaattattactgaaaaatcccaatcctttccgatcaagttctttgatcagatattccacaatttccggaagcgtccgtttaccgtcaatgagatgttccacagcatatttcagcagtatacttaaagaagctgtctgctccgtatccacaatctgttcaatatagcgcagatccacatcctgtctgcctatggaaaatccatcctttccatgtgtttttgttttcagtctgtccggacggtcagaatctctgcgaggggatctgggagctgcggaagcagcttttgtcatgatccggcagcttttgggaaagtggaatcccggcacagagatttcaggaagcggatactggctgcagagagtttttaccatgtgggtaatgtccagcggataatagctgtccatctggatcactgtgtctgcaatatgaaaaaaggcaccggagcttccggcaaccagaatggtggagattccagctttgtggtacagatctcctgcccgttccagaaacggagtgataggctccttttctctggcaatcactttctgcataaaagaatcccgtaccataaagttggtggcagaggtatcttcatccagaagaaataccttactgccggcttctattccttcaatgataccggcagcctgtgaggtacttccgctggcatcttctgtagagaaacaggaggtgtcttttttatttggaagatcattgataaaaagagaaatatctacgtctttgataaaacgaccgtcctcagaacgcagcttcagagccgtatcatttgtgaccacatactctcttccgtcacccggaacatggttataaacgccaagttccagcgcattgagcagagtggatttaccatgatatccaccgcctacaatcagggtgattccctccgggatgcccattccggttatctttcctttatgcggaagcgtcatggtgacccgaagagtatccggagactggaaggggatggaatccttcatgggatgggaggatatcccgctttctctgggcagaatggcgccgtctgccacaaatgcagccagagcttcttttttcagctgttcccggatataggcctgatcttctgcgagaaagatggcttcttccagtttttttgcatccagatttttataaagaaaggctttttgtacacagattggcagaaaatcaaacaggatcttttccagctcaacggaattaacagtgcgtccgttggcaggaaagccgataaagaaacgggcggtgattccctggtctgtgatctcacaggcagttcgtttaagtacctcctgaccgcagtggctgacagagatcaggccgctttttcccgaaccctttgcccggaaggaaaaacggttgatctgctgttcaaactgacgggtcagataatcacagagagtaatttttgtaacaggattttgcagatattcttccggaaaaccggcagttttatgagaaacccggatgctgatatgagagggagaggcaaaaggatctccctgaacatggtcaacagataaaatgtaatgaccgaactgatacgctcctttcagagatttatatgcaggatagctttttctgtgaatggagtgaagcatgttctgcaggtctgtagattgctgcataataaagttgcctccttgataaactaataaatggcaggactgcctttctgttcattttagtaaatcagaggcaataaggcaatgatttttggaaaagaaaatacccgggaaaacataaaaatttccggaggctctttcttaaatcttctttaagatttgtcaaaatgtgtagaattttagacataattggattataatgtacaggaattgtgtattgattcaggcaggagcagggcttttgcagaaacaatgaaacccgacgttatactccggaaacggggtattaaatacgaattatattaaggaaaggtggaactaatatggaacgaagaaacgcatggctcagctatggagaaaatgaagaaaaagagatggagcagattgcaaaaagctacaaaagctttctggatgcaggaaaaacagaaagagaatgtgtaacagagctgatcagacaggcagaggctgccggctatgtttccatggagaagaagcttgcatcaggagaaaagatccaggcaggagacagagtttactctgtggctatgaataagatcctggcatttttccacatcggacaggagcctctggaaaaaggaatgaatatcctgggagcgcatattgactctccccgtattgatattaaacagaatcctctttatgaagaggctgatatggcatatctggatacccattactacggcggtgtaaaaaaatatcagtgggttgcgcttcctcttgccatccatggtgtgatcgccaaaaaagacggtacagttgtaaacgtgacagtgggagaagatgaaaatgatcctgttgtttatattacagatcttctgattcatctggcaggaaaacagcttcagaaaaaagcagctgaggtcattgagggtgaaaatcttgatattctcattggaagcagaccgctgaaagatcttgatgacgacaaaaagaaagaggctgtaaaagaaaatatcctcagaatcctgaaagaaaaatatgatgtagaggaagaggacttcctttctgcagagcttgaggtagttccggcaggaaaagcaagagactgcggactggacagaagcatggttacgggctatggacaggacgaccgcgtatgcgcatacacttccttcctggcaatgctggaaatgaaggatccgaagcgtacagcctgctgtcttcttacagataaagaagagatcggcagcgtaggagcaacaggaatgcagtccagattttttgaaaacagtgtggcagaacttctggaaggaatgggatgctattctgatctgacactgcgcagagttctcagaaactgcagcatgctgtcctcagatgtaagcgcaggctttgatcctgcatatgcagaagcatttgaaagaaaaaatgcggcatttctgggaagaggaattgttctgaacaagtttacaggagccagaggaaaatccggttctaatgatgcaaatgcagaatatgttgcaagagtacggaagatttttgacgatcatgagatcgcattccagactgcagagcttggaaaggtagatgtaggcggaggcggaaccattgcctatattgcggctctttatggaatggaagtcattgacagcggtgtggctgtgctgagtatgcacgctccatgggaagtaaccagcaaagccgatatttatgaagcaaaaaaagcatacaaagcatttttacttgacgcataaaagctgttttgggcaaaaataataatttaatgccagaattttgaagttttgaaaagtcttttttcgttttataagtgaacgaataaattgtatccgcttataaaggcgtggaaaagagagtataaaaggagaaatcatgggggatacattaatcaaggtagaagacctgtgtaaaatttacaatcctggagaaaacgaggtccgcgctctggatcatgtgaaccttgaaattaaaaccggagagtttgtggctatcatcggccagtccggctctggtaaatctacgtttatgaatatgctgggctgtctggatgtgcctacttccgggaaatattatctgaatggaacggacgtatccaccatgaaggacaatgaactgtcagtggttcgaaaccgagagatcggatttatttttcagggctttaatctgattgcaaatctgaatgccatcgagaatgtggagcttcctctgatatatcggggcattgacaggaaaacaaggcataagctggctattgagtcgctgaaaatggtaggtcttgagaaacgaatgcagcataagccaagcgagatgtccggcggtcagcagcagagagtggcaatcgccagagccattgcggcgaaaccgccggttatcctggcagatgaacctacaggaaatctggattctgcatccagcagagaaattctcggaatcctgaagcaaatgcatcagtccggaaagaccgtgattcttatcacacatgacaacgggattgccgatcaggcaagacgggtggtaaggatcatggatggaaagatagaatcagacaccataaatcaggattttggtaaaggagaggaagtattatgaaaaagccaaagaagaagctggtgatcggagttggagcagtagcagtggtggcagccggagcaattgcagttttgggaaatcccggaaaagaaggggaaacacttccgaaggtggaggttgtggaagctgtaaccggagatgtgcagcagacggtagaggccagcggaactgttgtaagtgaggaagaaaaaacgtatttttcaccggcaaatgcaaaggttgatgaagtttcctttaaagagggagaaaccgtaaaggctggaacaaagcttgtagaatttaatatgaaggatcttgagagagaagagaaaaaggctgaactgaatgtgaaatcaggaaagcttgacatgcagaatactctcaataaatctgacaaagcggtaaagaaacaaaaggatgcccagggaaatgtagcttctctggagcagcaggtggcagcgcagaaaaattatgtggcaagcctgaaatcacagctggctcaggtaacagcagacgctcaggctcaggcggcagcagaggcagccagaaaggcggaagaggcaagaaaagctcaggagaaaaaacagcaggaaattcagcgtcagtatgaggaggcagtgagaatttatgaaagcgagacgcttcccgcataccagaacagactgaatgagctgaactcagcagcaaatcaggcgcttaccgtgtacaatcaggctgagaatacatatcagatggcatttactgcctggtcagcagatcagagtccggaaaatacagaagccctttctcaggcagaggcggacagaagcaatgctcaggtagagtaccagaatgcgcaggctatttatgaggattacaaaactcagatgccgccggctcctcttttatctgattttacaggcgcttctgatctggtgacagacggaagcggcagcgatttcagtgatacaccttccggggatatttcagggggaagtgtgtcagtggatacttccggaatagaaatagcgcttgaacaggcaagcagcgatctggcagagcttcagtcagagcttgcgtctcaggaggcaattgccgaggcagatcccaatgcagtaacaaaagaagaaaaggaaaagatgaagatcacaaataatctttccgaacttgaaaaaatgtctgccaaagagctggtagagtctgcaaaaaagggagtaactgcagattttaacggggttatttcaaaggtaacggtggtagagggctctacagtaacccagggaacggaactttttactttgcagaatacagacaaagtagatgtggatgtcaatatttccaaatatgactatgacaagatccaggaaaatcagaaggcagagatcactcttgcaggaaaaaaatatgagggaactgtaacatctgtcagtcatattgcaacacagaatgaaaagggagcttctctgatttccgcaagagtaagaattgatgatccggatgaaaacgtatttcttggggtagatgcaaaggttaccattcaggcagataaggcagaagatgttcttgttcttccggcagaggttgtgaatatcggtaaacagggatctttctgttacgttcttgaggacggagtgatcgccaaaaagaatattgaaaccggtctgagctccgatgactacatagaggttactgaaggcattgaagagggagacactgtgatccgggatattggaacacttcaggaaggaatgcctgcagaggctatggcgtccggtgatgccgcagtgacgggagaaggtgcctgatgaatggattttatgaatatgtaaaaatggctgttcagaatatccgcgcaaataaaggccggtcttttctgacaatgcttggtatcattatcggaattgcttctgttattgcaattgtttccattggtgagggaacaaagaaccagatgaattcagagatcagtgatatcggaggcggccaggtttacatttatgtcagcaatgatgcaatcacagaacaggaatggatcacacctgaagacattaatgcagtccgtgagctggaaagtgtggaaggggtaagtgttgctgaaagctatgacggtgaaacagttaccggaaagggaaactttaatcttatggtaactgcagaaggaccggaccccaaaatggtaaataatgcggacatgaaatatggaaattatttcggtgaacgggaagtggaagaggccaaacctgtatgtgtgatctctgatgccgatgccagacgtctgttcggcacagatgatgtagtggggatgagtcttgacattacctgctatgatgtgacgaaaagctttcgtattgcaggtgtgactacccagaaagaaaacggaacctttgtcagctatacatatgaaggaatgcctgtaacagtaaatattccctattctgcaatgaatgagctggtaggagatgtggactatttttattccatgactgttcaggtggatacaagtctggactctcagaaggttgccaatgagatcgttcatctgctggagaagaaccaccagagtgcaggagatgattatttccagatccagaatttccaggatgttatgaagtccatgaaccagatgcttggcatggtaactgcattcatttcctttgtagcaggaatttctctgctggtaggaggaatcggcgttatgaatatcatgcttgtatctgtaacggaaagaacaagggagatcggtatccgaaaatctcttggagcaaaaacctcttccattatgatgcagtttctggcagaagcagccattcttactgtgattggaggagtgatcggaattattctgggaattatcggagcgtatggaatctgcagcgttataagcgcaagtatgcagatggtgatcagccccggaatcagtctcagtacaattatgtttgcaactctgttttcctgtgcagttggtgtattctttggaatttaccctgcgagaaaggcagcgaagctcagtcctattgaagcgctgagaagaaactgagatgatataagggttttcctgtgggagagaactggcagggagtcaggacaaagcctccccgggaagcccttttttgtatacagagccgcaaattaagctgcaaaaacgaaagcaaaattctataccggaaaacttctggaaaaaaataattttttttcaaaaaagtgttgacaaaaaacacgttatcatgtagaatactctttgttgcgagggaagtcgcaaggatgtgcgtttagctcagctggatagagcgtttggctacggaccaaaaggtcgggggttcgaatcctctaacgcacgctaacagttatgagagccttgatttttcaaggctcttttgtttttgttagtatattattttttgacaaatacttgacaaaataagtttgatttaatataatgaacgatgttcaaattaaattgattacttatgagaaaggaaatctgggaatgaaaaaaatattaaatacttctatgatttattttattcttgctgcggcagcaggagtgttttacagagagtttacgaaatttaacggatatacaggagaaacggcgctgagctatgtccatactcatttatttgtgcttggaatgttcgcgtttcttgttatagcgctgtttggatgtcagaagccggaattatttaaacagagtacatttaagaaattttttatcctttataatatttccctgccgtttatggcagttatgcttcttgtaagaggcgttgttcaggttcagggggcagagcttacaaaggcggcagacgccatgatttcaggctttgcgggaatttcccatattttaattggaattgctgttctggtactgttccggtccctgaagaaatgttttgagtgacgagaacagaagaatggaacaggctatcagcgtaagaggaaaaaacataatcagatgctgaggtaaaacattaaagataatatgaacactgtgttcaacagtgattgacaacagacagaatctatgacgattctgtctattttatttttgcatattgattttaaaaagttacctgtgatacagtacaaataacagaaaatagtgagcggatatttggaaaaataataatattttaaagaaacttatgggaaagaagcaaaaatttaaaagagcccgggattcggaagaggagtttatggacgaaatagattgaacagtccgtctatagtggctgagaatctaaagggcggaaagggaggatactatgaaagctgcatttaacgaggatgagctgagggtaattggaaagcatacccagttcggtatttacgggggagaggatacagaagcagtaagctataattatcccattactccgaaagagaatatgcttcgtatgctgcggggagaaaaacctttatgggttccaaatcagacgctggaaaataatgctctgcagcctcttgtaatggacgatgcccgggccaggaattttggaggaaaagactggtttggcattgaatgggagtatgagcctctgacaagagcggctatggtgaagccgggaacccggaggctggatgacattactaactggagatctctggaatttccggatctgcgcgccatagactggaaaaaggattacaaagaaagatatgaaggaaaaatatcccaggacaggctgacttattttatcattgtaaatggattttttgagagaacggcagatcttacaagctttgaggatgcgttctgttatcttctggaggaaccggaagcccttacagagttctatgaccgtctggcagaatggcacattgaactgatcaagattgcaaaggaatattatcatacagatatgattctcttccatgatgatatgggaactcagatcagtaccttcttttcaccgcagatttataaggaactgtttttgcctcagtacaaaaaggtcacaaaggcagctcatgacatgggaatgtatatctgtcttcattcctgcggatgtatcggttctctgatgcctctgatcattgaagccggatttgacgcatgggagggacaggattcctccaatgacaaaaaggctattatggatcaatacggaaaagaactggcccagtgtacgttatttgtgatcccggctgatatgagtgatgaggaagctgttgcagaggttcacaaaagagtggatgagctgggagtcagcggacgttttgcctgccgcctgaaggatgaaaagcctgaccggaaagtagatcttgctcaggagctttacagatacagccgtatcagacttgcagaaacgaaatagaaaaggagagggggatttctctatgaaggagcaaaaacaggaaaaaaagggactcagcggcgcgctgaaaaagttttatggtgtgggggactgtggatttactctgatgtcaaatattgaaagctattatttcagcttctttctcacaaaccttgccaagttcagccttccaatggttacgtttatcaccacaacggcaagcgctgtggatgcgctgctttcctggatttacggggccattctgaacagcatcaaacctatgaagtggggacgctaccgttcctggctgatcgctattccatggctggttccatttctttatgcatttcagtttgtaaagatcggcgacggaatggtttcggctgtgatcatcattatagctgccattgccagccatgtggcgtggaactttgcgtatgttgccaatgtttctatgatctcagtggcaggcaaaacgccggaggaaagatcgcagctttctgctacaagagcagcctgggccaatttttcaaaggttattttttcttacgtaggtcccggacttgcagcagtaatggcagggatcatcggagaagtgaaccagtacggcgcagctgcgtttgtgcttggatgtattatggcagtgctgtattacgcgcactttaaaatgtttgacggttatgagagtgtgcagcctgcagagaacgcagggaaaaaagcggcaaaggataaaaccggcggcatggatctgatccgggcgcttttgcagaaccctccgctgatcgcgcttctgatcgctgaccttgccaagtttatgtttaactttgtactgatgggagtggcagcttattactttacatatatcgcaggcgatgagggaatgctttccacttatattctggttactaatattttctgtgtgatcggagcttatttaagtaagacgttaagcattaaatttaccacaaggacaacaaccattggagttatggcaatccaggctgtgcttctgatcatctcattcctgatgtatgataacgtaatggttgtcattgttctgatgagtatcgcaatgttcggatatggcattacttatgcttgcacacctgccctgtatggtgataccattgtatatagtgaatggaaaacgggaaaaaatgcagcaggctggatcagcggacttcagaacgtacctctgaaggtttctattatgacaagaggaattatcatttccgcatgtctggcaatgggaaatttcagcccggatattgatccggcggcagcctctgaggaactgaagcgtgccataagtcttggatttatgattattccggcagcggctcttattattgcagttgttgctctggtatttggatttaagcttaccaaggataaggttgatcagtacgcacaggagatcgcatcccgttcataaacagataaaggacggtcaggcaggatggagaacagggatatcagatttcttttaaatctgcagatgctggcagatggaataaggaaaagctttccggaactggaattttatcagggagaggacgaagcatgtctggaaggagtgcgttttttccagaaaggaaagaagctggattcccgttatgtgtatattgcagatgtagatcagctgaagtctgagatccctccggatacccgctgctctctgatactggcagacagagagaagatttcagataaaagaaatatctgtctgaaccggaatgataaaggcagccgtaatgcatgtgctccggatcctctgaacaaagagtactgttatcagagccagagtaacgaaaattatccggacaatggtaaattatctgttcaggatcctctgtctgaacagaataaatgtgagaagtggaacaacggcagaaacagcattatccggatatcaggggaagcggagcttacagagctttttaatgggtgccaggagattttccggtatcactgttcctgggcagacactttaaaaaatatagtgatctgccagggaagcgtggatgatctgtgtaaagtaagctgtgaatacttccataatcctgtttttgtgcatgattccagactgaatgtgatttcctgtccggtatggagagagggaatgatcaactggcagagggatgaaagtacaggacttctgatcactccgctggaagagctgaatgagttcaaaacagacagagagtatctgaaaacacttaccactacaaaagcagatattttttctgcagatctgagaggctacagggatatttatgtgaatatctggggcagctacggaggatatgaaggaagactggtcatctgtgaaattgacagctctctggaaccgggacagcttgtatccgcagaatatctggcggaaatggtacgttttgttctggaaaaacggggccatatggaaaacacttataagcgggccctggaagtaatgctggtgggaatgatacagggaaagaaattttctgattcagagattgcaagccggattgaacagtgcggttggaaaacagaagactcctatgtatgcatccgcctggacgcagaggagcaggagggaaatccgggatcctcagcagccagtctctgtaattatgtggaagccagagttcagggaagcaaggctgtaagcatggacaaccgggtctgtattattattaaccggaacctgaacagacattatacgtcagatattgcaggcattttaagagacgggctgtttaaggcaggattcagcaatgtgtttcataatctgactaatctggaaagctgttacaggcaggcatctacagccctgaagtactgccggaagaaaaatgatatgatgtggtcctatacattcggagatattgtaatggactatatcggagacctttgcagcagtgaatttgagccggaagagctttgtgcatatgaattaaaaaagctgaaggaatatgatgctgagaaccggacagagctgtacaaaacactgatgacttatattttaaatgaaagaaataccgtagccacagcttcagacctttatgtgggacgaagtactttgttttacaggctgcgaaaaataaaggagatcacagggcttgataatgaacatcttgccaggcccataaaaaatctatatttgagactctcgatttttcttatggagagaggataacaggagaagggagatggcttttatgctgacaccaaaacagaatttgctggaaacactgaaaaaagacggaaaaccggaatgtctctgtaattcctttaccatgtttcggggaatccccggagatccctgctttaagctgatacgcggaaatcgcatcagaggaataaattcctatgaccagtggggaactctgattctgtttccggaggatgctccggcggcaattccctatgttacagaagagaatcaggtgataaaggatgtggcggaatggcagaagtatgtgaaggttcctgacctgacaggaaaatgctccgaaggctgggaagaagctctggaagcaaaaagtaagatcgaccaggagaaataccttaccatggtagtaatgggaaccgggatttttgagcagcttcacatgctgatgacctttgaggacactctgatgaattttttgctggagccggaggcaatgcatgagctgatcgatgtgatctgtgaataccgtcttacctatatgaagcttgttgtggagcatctgcatccggactgtattgtttcccatgatgactggggagcaaaagacagcctgtttatgtcgccggaggtatggagagagttctttaaggagccgtacagaagactttatgattatcttcattcacagggagtaattgtaatgcatcatgcagattcctatctggagcctattgttgaggatatggcagagatcggcgtagatatctggcagggagttctgaacaccaacaatattgcagcgatttcccagaaggtaggggacagaatgcttctgatgggcggaattgattctgtcatagaccgggaggatgccacagaggaggaaatcagaaaagagacaaggcgtgcctgtcaagagtatggaaacctgaaaggctactggccggggatcacttacggcggaccgggaacgatttatcctcatgtagaagaaattgtgatcgatgagatcaaccgatataatgaagaacgatttggagtttctgtttcataaaaaatgtcccggagatgtactgccgggtactgcagataaaaatatcagcatcaggaaatggaggagagaatatgactgcaaaagaaatttttctggaaacaattaaaaaggacggaaaaccggaacggcttttaaaacagtatgagggacttggattttatcctcccaatccggcatccacttatatccggggaaatcgccaccgtggtatggagccaatgaaagacaggtttggtacagagatcctctggccggcagatcagcttgcagcaatgcctcatgtaacagaaagcaataaggtgatcagtgatatctgtgaatggaaggagcagttgaaaatgccggagcttctggaaaactgttcagatccggctctctgggagccatttaaggaaaaagctcaggaaatccgggaaagcggaaagctttttatggcatttatgccaacaggagtgtttgaacggcttcactttcttatgggatttgaggatatgctgatgaatttccttctggaacctgaggatatgatggagctttgcaatgccattggagagtaccgttatcagtatatgaagcttattgtagataaccttcagccggatgtgatgctttcccacgacgactggggatccaaaaatcagctttttgtaagcccggaaacatggagagagtttattaagcctcaatatgaaaagacgtatggatatatgaaagaaaaaggagtcatcatcatccatcatggggattcctttatggaacctgtcgtagaggatatggtggagcttggcgttgacgtgtggcagggagttcttcctcagaatgatattccgaagcttcagaaacagcttgcaggaaggatgacactgatgggaggaatcgacgcatccattgtggacaaggcagattccacagaggaggagatacgcagggaagtaagaagagcctgtgatgaatatgctccgggcggacattttatcccatgcattacttatggcggaccgggatgtcttttccctcatgttgacccgattattgacgatgaaattgacagatataacagaacagaaaagtgaagacaagatgaaatataaaattacctttgaagatgaacagcttacctgcctggcagaggcaggaaccacggttttggaggcgcagatcgcagcaggaatgactccggatgctttttgcggaggaaatggaaaatgcggaaagtgcaaagtggtgatcaatggaaaagaagtgttggcatgtaagacggcagtagacagagatatgacagtgtatacaggaaataaaaaagaggagcgggctcagatccttgcacagggaagcggcagacaggcagaattttcccccggaaatcttccggaaggcacagatacaccgcttctcagcgctgtggatattggttctacctctgtagtggcctatcttctggacggaacaaacggagagctgcttggaacaaaaagtattctgaatcctcagagacagtttggagcagatgtggtcagcagatgcagctatgcgctgaataacggcggagaggctttaagcggctgtatccgaaacgcagtaaacatactgttaagagagctggcaaaaggggcgggaaggaacccggaggatattgtgagaattgttatggtgggaaattcctgtatgcatcacctgtttctggggattccaactgatacgctggctctggcgccctatacgcctaaagttaccgaagcgcaggagcttatggctgcccggtatgacattcatgtacatccccgggcgcagctttggtggcttcccaatatcggcggttttgtaggcgcagatactgtgggatgtctggtggcatctgatctggatacctgtgaagaaatgacgctgctggtggacattggaacaaacggagagctggttctgggaaacagagacgggctgatcgcctgttctacagcggcaggaccagcctttgaaggagcgaagatcacctgtggtatgcggggcagcaaaggcgccattgaccatgtaactgtaaaagatggggaaacaatctgccatgtgatcggagaaaccgaggcagtgggaatctgcggctccggtcttctggatggggctgcctgtcttttgaaactgggaaaaattgatgagacaggaagactggagaaggagtatcattttactgaccgggtatttctgaatcaaaaggatatccgggagcttcagctggcaaaggctgccattgcggcaggtatccgaagtctttgcgagaagaaggggattaaggtcagtgatatcagccgtgttctgatagccggagcctttggcaattatcttgatcctgccagcgcctgtgccattggaatgattcctcctgaacttcagacaaggatcacctccataggaaatgctgccggggagggagcctgtatggctgctgtgaatcgggaacagtttgagcggagccggattctggcacaaaaggctgagtttgtggagcttgctcttgatatgggatttcaggagatttatgtagaagaaatggagtttccgggggaatcagaacatgaatgagcttgacagaataatggaaatcatagaggcagccggtttttcccatacaggaaaaatcagtatggatacggtagaactcagggatgaggtacgggatatgtgccgcaatggaaactgtggaaaatatgacaggaactggtcctgccctcccggctgcggaactcttgatcagtgcaggcagcagcttctcagctataagaccggaattcttgtgcagactgttggagaaatagaggacagtatggactgggaaggcatgaaagatacagaagagcgccacaaaaaaacttttcttgaaacagcggaaaagctccgtaaaatagctcccggatttcttcctctgggagcaggaacctgtaccttgtgcagagagtgtacatacccggacagtccctgcaggcagccggagcggagaatttcttctatggaggcctacgggatcctggtcagtgatatctgttccggaaaccaggtaaaatattattacggtccaaaaacgatcgcctatacctcctgctatttctttgatttttcttcctgatccatcagataaaaggacagcatcaggtaaagcagctcatccgggtccgtgagatcggattttaaggctgcctcaattttttcaatacggtaaagaagcgtgctgcggtgaatataaagtgccgcagccgtttttgttgcactctgatgattctgcagataaaccctcagagtctcataaagctgagtgccggtgctttcatcctgatatttcaaatggagaagcttttcatggcagatcatgtaggctggaagctttcctgtgatctgttccagaatataaggcagtgcaacatcattaaaatgatggatccaggaggttggatttttgcgggagcctgtctgaatggaaatagaagcctgtacatactgcctctgaaaattaaaatgtcccagcatcactctgctgtaaccggcgatcaacagactgtcccggataaaaccggcaagcttctgagaaatttcatccagtgtaaagtcgcacaaatccagattaatatatacaactacatttcctctgtgctccactgcacaggcagccggaataaaattttccacataactgcaaatggattttagggtcagatttttccagtccagaattcctgttttaatcagaatgcactgataggaatgggaggacagccagccattttctgtaagctggtgactgacctccacatagtctgctttggaattggtaaggagattatgaaaaatccggtggagagggtacagagtatcgtgttctgccacagactttgtggacagcacataagaaataagagatgccagatgttctgccacaaagccaaaggtgtcatccagtggaagctctccggggcgaatcagaaggcggtatccggtttttccggaacgtctgatattgacgcacagagccggaggtgcagtatggtttccgggataataaaaataaccggtacggtactgagcctcttcgtaattactgtcctgcttcagagagttgacaacattctgagtttcttctgtggagccaaagattccgtctttcagttgagagtcaggctgatttccggttgcgatcactgtgaagtcaagacctatcactgtcatgggattgggaatgacagaagtactgaggtcaatcagcttctggacagagggctggttcaggatcaggtcaaacagatcttgattccactcttcgtatttccggaaaatttcctgtagaaatgaaagcacggaaacagcagaaacgttttcctgcaaaatgcacaaatttggatagtcatcctcttccagataccgggatttgccggtgaggatcaccagggtttcagacaggtgatgggagggaaccaaaaagtcagggtcatcactgatatatatttttcctccggccagaggcccgggagactgatagatcacaggatattccaggtgaggctctgaagacagccaggaagaggctgctgcagaaaaatgctgacgaagatgatatataataagctgggcgctgagtttcataaaaaattcctttctgacgggactgccgtgtcatttaaagcagttttttttattatatcctatatggtttccaggctcaatagctgcattcagatacttcatacaaattgtaggaaaatgaataagaaaatagacgattttgaaaatagagattatctgtatcctctgttatactgaaaacagttaaagtgtaggagggatttacgcatgataattattggggaaaaaatcaatggttccattcctgctgtggcagatgccattgcccgccgtgacggggaatttattaaagaaagggccagaatgcaggacgaggcaggagctacgtatattgactgctgcgcttctgttccagaggaacaagaggcagaaaccctgaagtggatgattgactgtattcaggaggtcagcgatcttccgatttctgtggacagtccaagcgcggaggtgcttgcgcaggtgtttccatactgtaaaagaccggggcttatcaattctgtttctggtgagggaaataagatggacgtactgtttcctctgatcgcggatacgaaatgggaagtgatctgtctgctttctgatgatacaggtattccgaaatgtgctgcagaccgtctgagagtttttgacaatattatggcaaaggcaaaggagtacggaatcagtccggacagaatgcacattgatccgcttgtggaaatgctctgtacctcagaagatggaattgccatgaatgtggaagtgatcagtaccattcgggaaaaatatccggacattcacattacagctgcagtcagcaatatttcctttaatcttccggttcgtaagatggtgaatctgggctttacggttcttgcaatgaacgcagggttggacagcgcgatccttgatcccaccaacagagatatgatgggcgtgatttatgctacagaagcgcttctgggacgggatgattactgtatggaatacatcagcgcataccgggaagggattttcggaccgaaaaaataacagttattaattttaatataaaaatgaggaggtagtttcaaatggcaggtattcaggaagtttacgttttagtagaaaaaggaaaagcaaaggtaatcgcaaatgcagttcaggaagcacttgatgcaggctgtgatccgacagaaattctgaatgacggaatgatcaaggcaatggatgctgtaggtgaaaagtttaaaaacggtgaaatttttgtaccggaaatgctggtagctgcaagagccatgaaaaaaggtgttgaggttctgaaacctcatcttgcaacaggcgcagcaggggcagcgggaaaggtaattatcggaaccgtagcaggcgaccttcatgatattggcaaaaatctggtaagtatgatgctggaatctgcaggctttgaggtgatcgatctcggtgttgatgttccgaaagaaaaatttgtggaggcatatgaggcaaatccggatacaaagatcatctgctgttcagcgcttcttaccacaaccatgcctgcactgaaggatgcggtagcgcttattaatgaggcttctttccgcccgaatgtaaaagtaatggttggcggagcgcctattactcaggcttttgcagatgagatcggagcagacgcgtacacagaggatgcggcttcctgcgcaaagaaggcaagagagcttgctgcataataactgcggtttaaaagaaaatttacataaaatggctgtatgagaatgaacgagcggaacagggagttgtgatatgcttgaagaatcctttgagcagctggatcaggagcagtgcgctgcttatctgaaaaggctgaaacttccacaggaagagtgtactttggagtttctggacaggctgatcaggagacatctggaagaaattccttttgaaaatctggatctggtacgtacccatgagctgatctcaactgatctggatacggtttataaaaaaattattcagggcaaaagaggtggctactgttttgagctgaatgcattatttctgggcttgctgaggggacttggatatcaggcgtatcctgttgcctgccgggttctcaggcgtccgggacttcggatgcctacacacagggccagcgtggtctgcgctgacggtaaaaaatatttctgcgatgtgggttatggaggctttgcctgcgtccgcgccgctcttatggagccgggcgttgttacgcatactgattttggcagcttttattttgaaagagaatgtgcaggatggctgaatttctggcataagggagaaaaaaacagggaaaaatcaggcataaaaatatttatggtggcagaatttcccagcgctcctgttgattttgctccggcaaatcaggcaatgtgcagtcctggagccatgttttatgacaaggtagtggtgcacagaatgacagagtacggccctctttctgtagaaggaaatcaggttacacttcgcgaaaaggaaggcaagaagatcgttaccctttcttcaggagaggaactgagagaagtactgaaaaaagaatttaaaatcgaagtcatctgacaggtaaaacggtttccgtaaataaagcggaagccgtttttatctggcaggaaaaaatatattctgtacgaccactggaaggtaaaacggtgaatgataaaagataaaaactctccctagggctgcggtcatgtctggaaattttatattctatgtgctagactgattgggacagaaagctcagagattcagccttgtactatgaagtattctaacattatacaacatggaagatcatacataaatgctgagtattccggcaaatcaaaacagaaaaattcgtattttaatttgtactgaagttactgtgcaggaggcatttgaccaggttactgtgaatggagtgagcagtaatatactgaatcttgacgcaggattaaaagcagggaggatatcatgaaaaccagaatggcagagaatgcgaatataaaagaaaatgaaattcagaaagggattaaaaaagagacaggggaggaacagaagatgctgaaaaacgagtatctttcagaaataaacctggatgacagatttgaactgagagagatcagactaggagaagccgtagaagcagcaggggttgaaaaagcttgttttcctccaagtgaggcctgctctgaaaaaatgatggtagaacgtgctacaaaggcgccggagtattttcttgtggcagttgacagacaaacaggaaaaatcgcagggattttaaatggtcttgctacagatgagacaacgttcagggatgaattttttacaaacgcagagcttcatgtcccggaaggaaaaacagtcatgcttcttggactggcagttcttccggaatatcggggagaggggcttgccagagcgcttatgtatcggtatctttgcagaatggtgcaaaaagaaaaagacatggtacttctcacctgtctggattccagagtacctatgtatgaaaaaatgggatttcaggataagggagctgccaattctacatggggaggcgaagaatggcatgaaatgaattaccctgtgggaatcggcaaattgccttgaaaactgtcggagaaacccgtataatgtaaatcagtgaaagaaagaatgagggcacaggactattttgctccacaggtttcacagacatgggggaatgttatgaacaaaacaaaaaccatttgttttacaaataataagggcggcagcggcaagtctaccacctgttccaatattggcgcggcaatggcccgggccggaaaaaaggttctgatgattgacggagatatgcagttaaatctgtcactggcttttttttccgaggactgggtgctggaacaggcagcaggcgacaagaatctttatcatgcaataagagagcagaaggatctggcagattatattgtgcatacggattatgagaacctggatctgattccttcttctactctgatgagttctattgagtatgagctgtttacaaaatggcagagagaatttatcttaaaaaaatgtattcagaacataaaagattcgggcgtttatgattatattctgatcgatgcgccgcctacgctgggaggctgggtcatgaatatcctgtgtgcatcggatcaggtggttgttcctgtggaggcaagtccctggggaatgttcggtctggcaaatatgtttgatttcctgaacgaggtaaagcagattgcgccggaactgaaggttgcgggaattgcagttacaaaagtggatacccgtaaaaactattttaaacagacaatggaaactttacacgagctggaagaaatctatgtgtttgattcctttatcagggtggacagttctgtagaatgggcgcaggacaacagcgctccggtagtggagtacaaaaaatccagcagaagtgcaaaagaatatacagcgttggcagaggaggtaatgagacgtgtcagtaggtaaggaaagcattaagcgcgcggcaagcgcaggggcaaagaaaactgcagcagcaaagacagcagaagcagacgttaaaaagacgacggaggcaaaggcggcaactgtaaaagcagcagagacaaaggtttcatccgcagaaaaaacagcgggaactgctaaaaagacaacatcaggaaaaacatctgtaaccaaggcggcagcagctaaaaagacagcagccaaaaagacaacagcgagaaaaactacagcggcaaagactgcaaaaagtgtaaagacttctgtacttactcctgccaattcagaagagattcaggcaaaatttatctctgataaggcgaaacagccggaaagtgtcaatggcccggtgcatgtaacagaagaacttccgatatatcttctttaaaaaataagaaataaaaagctgtcacgggatcacaggaaagtatttttcacataaagatgagaaaatactttccgggaaattgattttgcggcagtttttatttggtaaaaatatggatgggagatggaaagtgtggaaaaagtcaggcatcagacatcagaaacatttcggctcagtgcgcttctggcattgtcaggaggcttccaggacgcctatacttataatgtaagagacagagttttttccaatgcgcagacaggaaatgtggtgcttatgagccagcatcttatgatgggaaagtgggcggaagccctgcattatctttttcctgtaattgcttttgccatgggggtatttgtggcggaaagagttcagcagaaatataaatacaggagctgtatccactggcgtcagattattgttgccctggaaattgcgattctttttctggtgggatttattcctgcacagtttaatatggctgccactatgctggtatctttttcctgcgccatgcaggttcagaccttccgaaaagtacacggttatggttatgccagtaccatgtgcatcggaaatttacgggcgggaacagagagtttgtctgtttatctgagggacaaaaagcccggagctttgaaaaaagctgtacattattatgggattattctgatttttgcagtgggcgcaggactgggcggagtgatgtctcttcatattggactgagagctatctggatatctccggttcttcttacagcagcctgtctgttgatgaattacgaaaaaatataaccgctgatatgttaaaacacagatggatttatgataaaataaatgcagatattttgaaaaacggcaggtgagagtatggagtttcagcacgaactgatcattcccaatgaagggctgcccttcaagatttttctttttgaggggagcagggggaactatataagagaaaagcactggcatacctctatagagatttttgctgttatggagggagagctgcttttctatattaatcatgagaaatatccccttcatgcaggagaacttctcatagtgaatgccaatgaaattcattcagttcatgcattaaagacgaataaaaccgcagtgatccagattcctctcaggcagtttgaagggtattttacagcccagcagtttatccggtttgagggcggtgtgcgcggtggaaaggacagcggcaatccgtcagataagcggctgatctctctggtgcagagactttataatgtgtatgcagaaaagcggaatggatacgattttcgcacgatttctctgtattatgagcttctttatctgttggttactcagtatcgggtaacagaggttgaggagaaggagcttcggcataaccggcatttgaatgctctttccagaattaccacttatatgagagaacactacagagaagagctaaagctttcagatctggcagaaatgttcggatattcagacgcttatctgtcaagaatgttcagggagtatgcaaaagtcaattttaagacttatcttcaggatatccgtacctcttatgcctatcgggatattctgaatacagatcatacaatcagtcagattgcgctggataacgggttttgcagcagccgtggactgtccaaggatttcagaaagcgatacggggtgcttccaagtgaggtgaagcgcgaaaaaaagcataaagcagctgaacaggaaactgacagcttaaaataaaaatgtcaaaaaagcgctataaatcagataaaaaaagcggcgaaaagtataccggactgtggtatgcttttttcaatgaatgagagcaccggagagcaatgggactttcatggaatttgtaaggaggaattacaatgaaaattcagaatgtaacagatgattctttccgaaaatacggaaaagttctggagggatatgacttcaccggtcttttaaaagaaatgaagcatatgccagtaccggaagatgtgatttacgttccttctgtagatgagctggaggcattggatgtggcaaaagagcttcagaacagagcctacggcggactgccgattcagatcggatactgcaacggacacaacaaaaaactgaatgcagtagaatatcacagaaattctgagatcaatgttgcagccacagatctggttcttctgatcggagaacagaaggatattgaggatgattttacatacgatacatcaaaaatcgaagcttttcttgtaccggcaggcacagccattgaggtgtatgccacaacactgcattatgcgccctgcaatgtaaaagaaagcggattccagtgcgtggttgttctgccgaagggaaccaatacggagattaatttccagttggaaaaaacaggagaggacgcacttattactgcaaaaaataaatggctgatcgctcatgaggaagctggaattgagggagcttttaatgggctgaaaggtgaaaatatcacaattgaataaggatgcagcatcagaaaaatcagaagatttataaaaagaaaattataaagagatatttataaaacttatacgcagtcgtataaaaacaactataaaccaataaataacagaaaaaatggaggaaaaaatcatgaataacatgccagaagtaaaagttggaatcgttgcagtcagcagagactgtttcccggaaagcctttctgtaaacagaagaaaagctcttgttgaggcctacacaaagaaatatgacgcaaaggatatttatgaatgtccaatctgtattgtagagagcgagattcatatggttcaagctcttgaagacatcaaaaaagcaggctgcaacgctctttgtgtataccttggaaactttggtccggagatctccgagacacttcttgcaaagcatttcgacggaccgaaaatgtttatcgcagcagcagaggagacacagaatgatctctgtcagggacgtggagacgcatattgcggtatgctgaacgcaagctataacctgcagcttcgcaacgtaaaagcttacattccggaatatcctgttggagacgcagaggactgcgcggatatgattcatgagttcctgccgatcgcaagagcaatcgaaggactgaataatctgaagatcatcagctttggaccgcgtccgctgaacttccttgcatgtaacgcaccgatcaaacagctttataacattggcgttgaaattgaagagaactctgagcttgacctgtttgaggcatttaacaaacacgcaggtgacgagcgtattccagcagttgtaaaagagatggaggaagagcttggcgaaggtaataagaaacctgaaatccttgcaaagcttgcacagtatgagctgacattaaaggactgggttgaggagcacagaggataccgcaaatatgttgccattgcaggaaaatgctggccagcattccagacacagtttggctttgttccatgttatgtaaacagccgccttaccgcacagggaattccggtttcctgcgaggttgatatttatggtactttaagtgagtttatcggaactgttgtaagccaggatgcagttacacttctggatatcaacaacactgttccaaaggatatgtataaagagtccattgagggcaaatataactacactctgaaagatactttcatgggattccactgcggaaatactgcttccggcaaacttgtttcctgtgagatgaaataccagatgatcatggcaagagctcttccggaagaagtaacacagggtactctggaaggcgatatccagcctggagacatcaccttctatcgtctgcagagcactgctgacaacaagctccgcgcttatattgcacatggtgaagtgcttccggttgctacaagatcctttggctctatcggcgtatttgcgattccggaaatgggacgtttctaccgtcacgttcttattgagggaggctatccgcatcacggcgcagttgctttcggacattatggaaaagctctgtttgaggtattcaaatacattggcgttccggtagaagagatcggttacaatcagccggcaggcgtaagatatcctacagaaaatccatggggataagatcattctccagatgataaaattctgaaatatacaggctgaaaatccattgccgcaggccggagggaataaaaatcagctttgtgaacaataaaagatacacgtcccggggaaacccgggatgtgtagtttaaaaataaaaaccgtactgaaaatcggactgaaataaaagaaaggacggaaaatatgtactatattggaattgatctgggaacctctgctgtaaagcttctgcttatggaggaatccggaaaaatctgtaatattgtatcaaaggaatatccattatttttccctcatccgggctggtcggaacagaatccgcaggactggtttgctcagagcatggagggaatgaaggagctgacaaaggatattgaccgcaaagaagttgccggaatcggctttggaggtcagatgcacggccttgtaactctggatgaaaatgatcaggtgatccgccctgctatcctctggaatgacggacgtacccaggaggaaacagagtatctgaataacgaaatcggcaagaataagctgtctgaatacaccgcaaacattgcctttgcaggctttactgccccgaagattctgtggatgaaaaagaatgagccggacaaatttgcccgcatcgcaaagatcatgctgccaaaggattaccttgcatattgtctgtcaggttctttctgcacagacgtttccgatgcttccggaatgcttcttctggatgttaagaaccgctgctggtcaaaggaaatgatggagatctgtggtgtaaaagaagaacagcttccaaagctttatgagagctggcaggttgtgggaactctcaaaaaatccattgcagacgagcttggattctcggaaaatgtaaaggttgttgcaggcgcaggagacaatgctgccgctgctgttggaacaggaacagtgggagacggacagtgcaacatctctcttggaacctcaggaacaatctttatttccagtaaagattttggcgttgatgaaaacaatgctcttcattccttctgtcacgcagacggaagctatcatctgatgggatgcatgttaagcgctgcctcctgcaataagtggtgggcagaagaaatccttcagacaaaggattttgcggcagagcaggcgcctatcaataagcttggagagaaccgtgtattcttccttccgtatctgatgggagagcggtctcctcacaataatccggatgccagaggcgtgttctttggcatgtccatggactctacgagagcagatatgactcaggctgttctggagggcgttgcctttggtcttcgcgattcccttgaggttgccagaagccttggaattaagattgaacgtaccaagatctgcggcgggggagcaaagagccctctgtggaaaaaaatcattgccaacgtcatgaacctgaaggttgatgtacttgaggttgaggaaggaccgtccatgggaggcgccatgctggcggctgttggctgcgacgcatacccggatgtggaaaccatcggaaagaaaatggctcatgtagtggatacggttgagccggaaccggagctggtggcgaaatatgaggaacgctaccagaagttcagaaagctttatcctgcaatgaaagacctgttttaaattctgtaaaagataataagggggctgtaaatccgtgtatgcggagtgcagccttcttttttacaaaaatattaaaagctatagtaataaccgaatggatgtgctacactaaaattaattatacggctactgttgttacacacagcttataaagaaggggagagaacggaatgtcagacgatcgtcataaaaaagcactggatcaggctgtacagaaacttcgtacacaattttccaattatgtaacagcaatatactgttatggaagctatgccagaggagaacagaaattctggtcagatgtggatgttctggttaaggtatcggatgatacttctcccagaattatgagacaaatgagagccgaagtaatacctgaacagtatgatcttcctgaagtggatctgaaattttcctcaggagaagaattcagtaccagctaccgatttaatgaaaatataaaaaaggaggggaagctgatatggaaaaaggactgagttattttgacctggcagaaaatgactatcagtttcttctaaaagataaaaaagaaggccgtgtaggcaatattatgtgttctgccgcacagaacatctgcgagagatatctgaaacatatgatagatacctatgtgctggattgtgatacaacccgaatccttcagacatattcactgagatttctgagaaggttcatacaggagcagattccggaatttgaaggaaactggaaagtgatactgcaggcagatggctattatttttctacaagatatcccggagacggtgcgtttattgttggaaaagaagatgtagaagagtgttgggaggcagtagaagaaaccagggaagcggtaaggaaatatctggaaagtcagaaatagaaaaatggattttagatgacagtttatgggagagcgaataggaaaacgctctcccatacttgtcagtacctgtatttttttctgtatttcataagcatccatgcagccagaattactgccagcagttcagcggcaggattggcaagccagattccggtaacacctaaaagggcaggaagggccagaaggcagacgatcataaaaacaaaggatctggtgaaagcaagtactgcagatactattccgttattcaaagcagtaaacatcccgctggaaaaaatattaaatccaataaataaaagagcagttgtgcagatccggtttccggtaacagcaagctgataaaccggggatgccggtttggtaaaaacagacaccagaggttcagtaatcagcagggagatcagggcagcgcttatagagattcctgtaatgatcttcaggctcaggcgcaccagctttttcagtttaagatggttctgagtgccgtaataatagctgatcataggtgcagctccataggaatatccgctgaaaagggagctgacaaacatcagtacatacatgatgatggtaatggcagcaacaccgtcttcgccaacatatttcagcatggtccagttaaaaatcagagtcgtgattcctgttaccagagcagttgccatttcagagcagccgttggttactgtttttttcagtacagagaaacgatatacaggttttacaaagtgaagcatgttttttctttgcgagaatacaataaatccgactgctgtagtaacagaatagcctattccggttgccacggcagcgccgccgattcccattccaagtatctgtataaagacataatcaaggataatatttgcaattcctcctgcaacagaacagataaaggacagggaagatttgccggaggcaatcaggtaaagagaaaaattattcattaaaaggatcgggatagtaaaaatcaggtaatgaccaagataatcccggcaatagcccatgacttccagagaaagcttcatattggaaaaaatcatgttcatggcaaagtatccaatcgtacccataataagaccgaccaggacatttacaagtatcagactggtaaaattcctgccgggcttctttttctttcttttcccccatttttttcatgataacagcgctgccaccggtagccagcatggtagaaacagcagtaaccagagaaataacaggggcagtgagattaatagctgaaagagcattcgttccgatgagccttgatacaaaaagcccgtctaccatggtataaaaggacataaacagagacatggctatggttggcagtgtaaagagtatgatatttttgaaagtgactggtttctgataggcattcagagatttgtcttttgtctgattcataaaattcctccttgtatttttgttgtgcatgagatatcataaactttacagtaagtgtaaagtcaagagggaaatatgaaaaatcaggaaataaatttaacaacagcccagtttgcagctattcatgaggtaaatcccagaactctgcattattatgattccgtaggactgttttccccggaaagaaaaggggagaatcagtaccgttattataccagccgtcagagtattgattttgaatatatccgtatgctgaaagagctgaatatgagcattcgggaaatccgttcttatgtccaggagcccggaccggataaatttatggaactggcaaatgaaaaaataaatgagataaacagagaaatacaaaggctggaaaagacaaaagagattctgaaagtcaggaaagagcagcttgcagtatgcagtcgtgtggatgatatgtttatagagttgaagctgcttccggaggagcgtttccgggtaattccctttgatattaaagaagaaaatttaaaggatctgttttcctgtgcaaaggattgctggggaattgaacagtgcagaatgggaatcggtagctatatttctgtggataaggtgagaaaaaagaggtttgaaaagtatgacggagttttttctcctgcgctgaaaacagaaaaaggcggagagattctgataaggaaaaagggactttgtctttgcggataccagagaggaatatgggaaaggctgcctgagctttatgaaaaaatgctggtatttgcagagaggaagaatcttaagttaaaaggttttgcatttgaatcaggtatgaatgattttgccataacagatgaaaatgattacgtcacaaaagtggagattgctgtagaagagtccctgtgaaagggcagatatccggggattgataaaaaattttattgaaatttgtgacagaaaatgtatttctattaacttttattgcattaaatttgcggcagatatttaaaatagaaaaccgtccggagaggttcgcttccggacggttttctgtatattacttatagagtatctatgagtgaccgtgattagaacagacctgtgatcttacctgtctcgtcaacgtcaatcttctcagctgccggtacttttggaagtcctggcattgtcatgatttcgccggtaagggctacgataaagcctgcacctgcagaaatcttcaggttacgtacagttacctcaaagtctgtaggagcgcccagttttgtctggtcatctgtcaggctgtactgtgtttttgcaacacagatcgggcagttgccaaagccaagatcttcaagctgttttgcctgtttctgagcgttagctgtaaggacaactctcttgccgccgtagattttctgaacgatctggttcagtttgtcctcaatggagccttccagctcataggagtaggagaagtcatcatttggctcttcgcagagacggattacttcttctgcaagcttcagaccgccttcgccaccttttgcccatacttcagaaagagctacgtttacgcccatttctttacattttgcctctacaagatcaagctctgccttggtatctgttgggaaagcattgatagcaactacacatggaagtttgtatacatttgtaatattgcttacatgtttcagaaggttcgggagacctttttcaagagcctcaaggttctcgttgttcaggtcagcttttgcaacgccgccattgtatttcagagcacgaacagttgcaacaacaacaacagcgtttggtttcagacctgccatacggcatttgatgtcaaggaatttctcagcaccaaggtcagcgccgaagccagcctctgtaattgtgtaatcagccagtttcagagacatttttgtagctgttacagagttacagccatgagcgatattagcgaatggtccgccgtgtacgattgcaggaacatgctcaagagtctgaacaaggtttggtttcagagcgtctttcagaagtgctgtcatagcgccctcagcgtgaagatcgcctgctgttaccggtttctgctcagaaactttaccgtatgtatatccgatgatgattctggaaagacgttctttcaggtctttgatatcgcttgcaagacacagaactgccatgatctcagaagcaacagtaatgtcgtagccgtcttcacgaggcataccgtttgtctttccgccaaggccgtctactacattacgaagctgacggtcattcatgtccacacatcttctccatgtgatttttctcgggtcaatgttaagagcgttgccctggaaaatatggttgtcgatcattgctgcaagaaggttgtttgctgcgccgattgcatggaagtcacctgtaaaatgaaggttgatatcttccataggaacaacctgtgcatagccgccgcctgctgcgccgccttttacaccgaataccggtccgagagatggctcacgaagagctaccataacgtttttgccaagcttctgcataccgtcagcaagacctacagttgtagttgtttttccctcgcctgccggtgtagggttgatagctgtaacaaggatcagcttgccgtcctgtttgtctgtttctttcagaagattgtagtcgatttttgctttgtactttccgtactgctccagatatttgtcatcaatacctgcttttgcagcgatctcagtaattggtttcatttcgcattcctgtgcgatttcgatgtcactcttgaatcccataagttttgtctcctttcataaacggaagcctgaacccggacagaaaaaatatcctgtctgagtaaaaaagggcagtatctgaaagtgtcaaatactgcccagacggtcggcttcacaaatctctgactcccctgtggttatccacgtctccgccagttgtcagagatgttttaaattgatgatgaaatggtaacatattaattatggtttgtcaatagtttgtcaaaaaaatatcaaaatattatgttgtatttgtatatctgatataaaaatactggatgaactttatatacattgcacaagtaaagtgtgatgcaactgtgtttgtaaatcggaaaccgtcagagaattacctggaagttccggtgagctttttcaggatcctgcagccgtggctgtacagggaaatgtggctcttgtgaaggtcaaagaaataccctgttcctgtaaggctgtcaaccacaactgaaagaaaggttgcgttcagatgaggatcaatcacagtttctgcaatagcactgttggtggagatatccttcagggctgttctggtatcttctgttaccccgttctgatacataataatgatcagacaggcattttgcccgttacagtcagaattattaaaattatcaatttcacggtcaagtgttccggacagatcggtagcatctgtcagttttatataatagcgaactgaatctttccagaaagagaattttttgcggtaataataaccgttttcatactggaatttgttttcgctcagagcctgctgtaaagtcgttttgcccatggcaggaagagaagtaagttcctgaccgttcagttttttctccttacggtctgcttcccacagcagagcatagccgatatttttcacaataagataaactgctgcgataccaaagataacaaagccgcctatagcaattgcatcgccgttttttacattatacttctggaaaaatattccggcgataataaagccaaaggctataaggcagcagacaagcccggaaaaatacagccggagccctcttttttcagagcggagctcttcctgctcgtcaaaagtgtcaggtacctgggtgttttcatctttcatagacgattcctcctgagatgtaaatataatataataattttatcacggaaaattttgaaaagaaaggataatactgcattttgggaaaatattaaaaataacagtgtgacaggcggatgttcctactgcaataccacatggcggcataaatgtgaaataaacagatatcaataaaagcgtaatggatatatataacagtaaccaataatattaaatttgcataattgtgaataccttgacatttttgaaggaccatgatataaagaaacaggattaagtgttgattttgcagttatcctgggatagttgcaataatcagtgaaaagggaaacgggtgagagtcccgtgcggtgccgccgctgtaagcgcataaaagcagttttgtttcactgcattccatacaggaatgtgggaaggaacagaacatgaatgctgcgcaaagccagaagacctgcttagttctttttgcatccacgggccatggtaatgcaaaaaacatagggatactgtacccatataagtaaaacagatgcactgcaggccataggaccgcagtgtttttttgtgtacaggataagtaaggagaggccatattatattttcaggaggaaaaacaatgtgtagcaaaaaaatgttcagtatgatgatggctgcggttatgacagtgggagtgagtgcagggacggtatcagcagagactgattatgaaccagtaactattactttgaatttacagcgttcaggtctgggagagaatgtagagtatacatttacagaaaagccatctgcggtagtagcatccggggaacaaatggcggatcttttctttgatctggggctggaggatcagatggcaggctatacaaaaggaaactgctggagcacaaaatcagaatttccggcaagcgagaaagttcctcagcttctggaaccgggacaggctctttctaatatgtcaaaagaaaaacttctggaaactggctgtgattttctgattggctgggattctgtatttgcagataaaagctttaataaagacttctgcgaggaaaatggtattgcaatgtatttcccgtatgtatgttcagatcaggccacctttgaagatctttataaagattacgaaactcttggaaagatttttcaggcagaggatgtggcagcagaaaaagtacaggctatgaagggcaagattcagtcagtgaaggaaaccattggcgaggatgcttataaagatccggtagaagtgtttgtttatgattccggtgaggatgcaccttttactgcatgccagggaatgccgggagatatcctgaagcttgcaggcggtatttccatttttgatgatattgaaaaaggctgggcaactccttcctgggaagaagtgattgaacgtgatccggaagctattgtaattctggattatacaggtaaggatgatattgctgccaaaaaagaatttctggaaaccagcgagtatacaaaagatctcacagcagtaaaagaaggcagaatttattccgcaagctgcagtgacatgcaggggtcagcaggaagcgcggctacagtggagcagattgcacagcagctttatccggatatgtttaaataagaggatgttatgaaaaagagatcaacagcaggcgggaggaggcattttgccgtccttctgctttttatattagggatgatcgctgtttttacctgtatttctgtgactatgggggcagtagaaatatcaccggtaaatattgtgaagatcattattaataaaagttttgggcgtgaaatttttgatgcagcatgggagacaaaaacagaaaatattatctggaatatccgtttcccgagagttctgctggcatttattgtaggagccggactgtcgctgtgcggagttctgatgcaggctctcacaaaaaattccctggctgatccttatgtgcttggaatttcttctggagcatcggcaggagcggtctgcgctatggtacttggaatgttcagcatttttggcggctattctgtgattgtgggagcgacagccggagcagcgctttcgattattatgtccatgaagatcgcttctgttcggggacgtatcacatccacccagctggtattggcaggaatagccacttcggctctgttttcagccataacaaatttaatagtgtatggcgggggcgcgtcagataagacaaagacagcgctttactggatggtagggtctctgagcggagctacctggtcccggctgcattatgtggcagtggtatttattattgcagtggcagtgatttttctgtttgcaaaagagctggatgtacttcttttgggagatgatgcggcagaaaatctgggagtggatacccggaagttaaaatgggttattattgctgcttctacagtacttacaggagtggtggtatcggtcagcggagtaatcggatttatcggtcttgttgtgcctcatatgatgaggggagttgccggttcagcacatagaagactgattccgctggcacttctgggaggcggactgtttgctgtgatcgcagattttctttccagagtgctgattgctccggaagaattgccggtgggagtgatatcggctttttttggagcgccttttttcctgtatctgatccggaaagggagcagagaaaagatgtgagggaggttatgagacagtgagtttagaggtaaaaactttggattatgagatccggggaaaagaaattttaaaggatatttctcttgaaattcatacgaaagaattcgtagggctggtaggaccaaatggctgtggcaaatccactcttctgaaaaatatttaccgaactcttcgtccaaagtataatacagtatttattgacggaaatgatattttaaaactgtcttccagaaaaatggcccgggagcttgcagtaatggctcaggaaaataatatggaatttgattttaaggttcaggatatggtaatgttcggacgttattctcataaaaaatttcttcagggagatacgtcccgggacagggaattatgtgcggaatatcttgcggaagtgggactggagggatatgaaaacagatcttatctcagtctgtcaggaggcgaaaaacagagagtgcttttggccagagtgctgattcaggaaagtcggtacattattctggatgagccgaccaatcacctggatatcagttatcagtatcagattatggatattttgaaaaaacaggaggcaacagtattttcttctgttcatgatctgaatctggcagctctttactgtgacaggattctttttatgtatcaggggaagatcgtggacgacggaactccggaagaggttctcacttcagagaacctctggaagtattttcagatcagggctcagatttcccggaatccggcaactggaaagcttcagatttattatcttccagattggatataaagaacatttttatcagtgtcttttccggaactgagaaaccagaaacaggactacgcccaccaccaggataacaggcagcagaaagctgagtaccataaacagaagcgcaagaacagctgccgccgccgcgatcacgatcagctttccgtaccaggtggaaagatccagatggtagtgccggtgtttgggctggccgtattcactgtccgactgatttccataacctgtgttttcggtatggtaaatatcctgtcctgaataatccgaggtattggttccggaaaaaacagaaggctctgcatcggtatcgatcagggttttggcaatcagtctgggatcgcccagtgaatccagaacctgtttttccttctgtcccctttttatggcatcctgtatataatcatggtaatattgtgtatgcgcagaggcttttgcctccggcatctggtctgaaagctgctcgtataaaatattaagaaattctttttttgtcatgtttatctcccgaaatcgttatgaacgttattttatttttgtgcagacttcctctgtatatcagaagaaagttttattctataagcaaacatattttttaaagctgaataaggattttgaaaatctgtgtttattatggggaacatggaaggattcttcctttatgcctgtctgacacagagctttctgcttaatatctgataaatgtgtatgcatagaattactgatattttatcatacagaaagaaatcataatagtttttgaaatattaaatttccataaaacaattcagaaggtccggtaaatttcatggaaacagaaggatgattttttagggctgttccgtaaaaatagcttgtatacattctttccaggttataaaataaaaaacagatggtctgatcatgtttttatgaaaagggaaaccagtacaaaaaggcaggaggcaggaaacatgttacgaacttttcttgtggaagatgaaattgttgtcagggagaccataaaaaagatgattccctgggagcagtatggatatgagctggttggcgaggctccggacggggaagtggctcttccaatgataaaaaatctgaagccggatcttctgatcacggatattaaaatgccgtttatggacgggctgaccctgtgccgtatggtgagaaaggattttcctgagatgaaaatagtgattctcagcggatatgacgattttaattatgcaaagcaggcgatagccataggggtagaagattatcttttaaagcccattacaaaaaatgcatttctggagcgtctgacagaaatacgggaacgctgggagagagaaaaaggacagcgggactattatgaaaagttccgcagggagattcaggaatacgaaagaaatgcaagcagagatttttttgaagctcttgtcagcggaaaaatggatgtgggagaaatctacagacaggcagagcggctagggcttgatattgttgcagaagtctacaatatcattctttttacaatggacaccggaacggaaagctatgatatttccgaagcgtactctgagtgtgaagctcagagaagagaaaaaatggaagctttttttgtggacaatgcaaatgccatgctcttccgtaacaatgcgttcagctatggtgttcttgtaaaggaaaagagagacgcgctttctgaaaatacagaaaaatgtgtggagttttttaaggggattatgaagggcgaaagggagcaggactggtttctggcagtgggacagccggtagaaagactgagcagtatcaaatccagttattatacagcttccaaaacctttgcaaggcgttatctttatgacggctctgttctctattataaggatctgaaacaggaagataccaaaagggataacagcccttttctgaaaaaaattgacatcaatgccctgaatccggccactctggaacgatttctgggaagtgggcttctggatgagacagaggactttgtaagagattattttcaggctatcggccatgaggcaatggaatctctggtgttccgcaattatgtgatattgaatgtaaggttttctgttctgggatttttgcagaaattaggctgcgaaccgggcagactggaaggacaggatacagagcaggagctgatggaaagggctcaatccatggaaactgccaaaaaatacgctcaggatattatccggaaggcaattatgcttcgggatgagaactcgggaaacagaaaccggagtatcctgaaatcagccattgaatatattgatactcattatatggatgaaagtctttctctgaatactgccgctcaggtggcaaacatcagcgccaatcatttcagtgccctgttcagtcagaatatgggacagacatttatagaatatctgacagctctcagaatggagcatgcaagggagctgctccggtgtaccggaaaacgttccagtgagatcgcagcagaggttggatataaagacgcccattatttcagctatctatttaagaagacacagggaatgacgccaagtgaataccgtaaaaccagggaggacagaggatgaagaagattcggctggaaacaaaaataaaaagaatccttctcggtacgctggtgcccatggtggtattaatgcttctgcttctggctattgtttccaggtatatttcacagtatgacagacttcttgagaatcttgctatcagcagtgaatttaatcttcattttaaggatgatgttgatcttggcatgtactctattgctgtaggaacagaggaaaacagctatttgcctgaagtgatgaaaagtgtcagggatgcggaaaaaatcttgaacaagctgaaagaaaatacatccagcagtgagagccgtaaaaatctgaagcatctggaaagttatctgaaaaaccttgaaaaaagaatggtggaattgacagagatcactgagtatgaccagaaaatggcttccatggacaacaatatccggattctgacccgtcttattgtagaggaaatgcagaattttatttataacgaatccatgtatctggttcatatggagtctcttatgacacaaagagtctatatgctggtgggaggagttgtggttctgtttgtgattacagtaggtattatgctgcgccgttcttttcggttttcaagaagcattacaagacctgtgacagaaatccttggaaatgtcagggaagtaggacggggaaattttgagatttctgaagtcaatactgacagtatggaaattgaggagctggatggaggaatccgcaggatggcagaaaagatcgagcagctgctgcagagtgtaaaaaaggaagaagaaatgcagcatctgacacagcttcagcttcttcaggctcaggtgaaccctcactttctctataatacgctggacaccatcatctggttgatcgaagggggacagaatgacgatgctgtggaaatgatctccaatctgtctgtatttttcaggacctcactttcaaagggaaatgatgtgatcactctttctgaggaaaaaagacatacagtcagttatctggagatccagcagtccagataccgggatattctggaatttgaaattcatattccggaagagtttaatgaagttatggttccaaagctgacgctgcagcctttggctgaaaacgctctgtatcatggaataaaaaataaaaggggcggaggaaaaatactgatcgagggagaaaaaagcggggacgatctgatcctgagggtaacggataatggacagggaatgaaaaaagagcgccttctggaaattcagcatgcaatccgcacaggagagcgggccggctttggactttcggcagtggcagagcggctgagactttattatggggccggatatggaatggaaattcattcagaggaaggcaaaggtactgtgatcgaaatccgtattggtaaaaaaattaatctctcatcataaataattcaactttaatcgtaaaaaaatcaatttgttaaattgaaaacaaaaaattgataaaagaccatacatttttccgaaaatattctatggagtttttggaggttttcgctataataaagacatcttaaaaaacaccgaaccaaaaagtaaagggaggaaatggaacatgaagaaaaaaattatggcagcagttatgacagcagcaatggtagcaggacttgcttctacctcaactgtttttgcagcagaggacacacttacagttggattttcacaggttggtgcagaatctgactggcgtacagcaaatactgagtccatgaaatctacattctctgaggagaacggatatgagctgatctttgacgacgcacagcagaaacaggagaaccagctgacagcaatccgtaactttattcagcaggaggttgattacattcttcttgctcctgtaactgaaaccggttgggatactgttcttcaggaagcaaaggatgcaggaatcccggttatcatcgttgaccgtatggtagatgtttctgatgacagcctctatacatcttggatcggaacagacgctcttctggagggccgtaaagcagcagaatggctgaacgcatacgcaacagcaaaagagatcaaaccagaggatcttcatattgtagatattcagggaacaatcggttccacagctcagatcggacgtacacagggtcttgaggaaggcgtagagaaatatggctgggatcttctcgagcagcagtccggtgagtttactcaggcaaaaggacaggaagttatggagtccatgctgaagaaatatgacaatatcaatgttgtatactgcgagaacgacaacgaagcatttggcgcaatcgacgctattgaggcagccggcaaaactgtaggaagtgacattgcaaacggtgaaatcctggttatttcctttgatacaacaaacgctggtcttacagacactctgaacggaaaaattgcctgtgatgtagagtgcaacccacttcatggaccacgtgcagaagaactgatcaaagctcttgaagctggcgaagaagttgagaaactgaactatgtagacgaggaaatctttgcagctgacgatactgttgcttctgtaacagcagtaaacagccttgaagaagaaggcgaatatgcagtaacaccgatcacacaggaaatcattgacggacgtgcatattaattacagaacagactgacaacaaaagtggaagcagataggaaagtctgagaaacaggaagtgaatccggagcgtggtacataattcggagaacccggatcagtggatcacgctccttttgcgctcaaaatcagagaagaagatctgtttttggcgtattttatatgattttacagataattataaaaatttagggaaagcaggtggaaagaatatggaacagaatgttgtgctggaaatgcgtgatatcagtaaaaatttcaccggtgtccgtgctctttcccatgtggatttcactttgcgtaaaggcgagatccatgcgttaatgggagaaaacggtgcaggaaaatctacgttgatcaaggttctgacaggcgttcatgaatttgaaagcggaagcatccgcatggctgacaaagaaaaaaatatcatcaatcattccccgcaggaggcgcaggaaaacggaatcagtaccgtatatcaggaggtcaatctgtgcccgaacctgactgtggctgagaatctttttattggacgtgaaccccgtaaaatgggaatgatcaactggaaagaaatgaataaccgttctgaaaagcttctggaaagtcttgatattcacgtaccgcctacccagatgctggatgagtgttcagtggctattcagcagatgatcgccattgcccgtgcagtggatatgaaatgtcaggtactgatcctggatgagccgacctcttcgctggatgatgacgaggttgaaaagctgtttgtccttatgagaagacttcgggatgagggagttggaattatctttgttactcatttcctggaacaggtttatgcagtttgcgacaggatcacagttcttcgtaacggcgagctggtaggggagtatgagacaaaggatctgccgagagtcatgctggtagccaagatgatgggcaaggattttgacgaccttgctgatattaagagtgctcatgaaggaaagaaagcagagggttccgttccggtaattgaagcagagggacttggacataagggaactattaaaccatttaatattaagatcaataaaggcgaggtaatcggccttaccggccttctgggctccggccgttccgagcttgtccgcgccatctacggtgcagataaggcagactgcggaaagctgaaggtcaatggaaaagaagtaaagatcaacagtcctctggaggctatgaagcttggtatggcatatcttcctgaagaccgtaaagcagaaggcattatcgcagacctttctgtaagagaaaatattattattgcccttcaggcgaaaaaaggtatgttccatccattaagcagaaaggaaatggaagaagctgcagacaaatacattgatatgcttcagatcaagactgcaagccgtgagacaccgattaagagtctttccggcggtaatcagcagaaggtgatccttggcagatggcttctgacgaatccggaatatctgattctggatgagcctacaagaggtattgacattggtacaaagacagagatccagaaaattgtccttgaccttgcagatcagggaatggcagtgacctttatttcctcagaggtagaggaaatgctccgtacctgctcccgtatggcagtgctccgtgacggagaaaaggtgggcgagctggaagagcatgaactttctcagagcagtattatgaaagccattgcaggaggtgacgataaagatgaataaaagcaaattaaaacagatcacaggcgcaaggctttttctcccgatcgtatgcctgatcgccgtgcttctgctcaatgtgataaaaacaccggacttttttaatgtatctatcaggaacggtgtcctttacggatacattattgatgttatcaaccgtgcttccgagctggttatcctggcagtgggcatgactctcgtaacagctgcttccggcggacaggatatcagtgtaggtgcggtaatggcagtggcggcagcggtttgctgtcaggtactttccggcggacaggtttcagttactgagtatcagaactccattatccttgcagttgtggcagctcttctggcatcagctctctgcggcgcgttcaatggattcctggtagccaggctgcgtatccagcccatggttgcaacgttgatcctgtatactgcaggacgtggtattgcacagcttatcacagcaggtcagattacctacatccgtgtggattcctttaaaatggcaggcggatatatcggaaaatgtccgattccaaccccgattttctttgcagtgatcacagttgtgatcgttgccctgatcctgaaaaaaacagcccttggtctttatatagaaagtgttggcattaacggaaaagcagcccgtctggtaggcctgaattctactatgatcaagtttctgacctatgtgatctgcggtgttcttgcaggtattgccggaatcgttgcctccagccgtatctattctgcagatgcaaacaatatcggtctgaatcttgagatggatgcgatccttgcagttgctcttggcggaaacttccttggcggcggtaaattcagcctggtaggttctgtaatcggcgcctataccattcaggctcttacaacaactctttacgcaatgaatgtaaaggcggatcagcttccggtatacaaagctattgtagttattatcatcgtaactcttcagagtgaggtatttaagaaattcattgccggactgaaaagcagaaaagcatccggcgcagtagcagaaggagggcagaaataatgaaacagaaaaagaaaatgacaagctcaggattccttttgctgatcacaattgttctgttcttcgtaatgtacgctgcaggcatggtgatttttgcagacaaaggttttgcgaaacctcagatgtttttgaacctgtttgtatccaatgcaggactccttgttatttcctgcggacttaccattgttatgataacaggaggaattgatatttctgtaggctctgtaacggcccttgtgtgcatggtaatggcagaccttatggaaaacaaaggtgcaagcgcttatgttgcagttgcagttgctcttggcatcggacttctgtttggtattgtacagggctttcttgtaacctatatgggcatccagccctttatcgtaacactggcaggaatgttcttcggacgaggccttactgctatcatcagcacagatatgatcgctattaaaaacaaggtatttctcagctgggcaaactaccgtttttatatgccttttggttccaccaacaaaaaaggtaaatttattccggcatacataccgcctacagttattattgcgctgatcgtagtggttctctgtgcaatccttttgaaataccgtaaattcggacgtaagctatacgctatcggcggaaataagcagagcgctctgatgatgggacttgatgtgaaaaaaacaatgttcaaggcttatgttcttgacggatttctggcaggtctgggcggtttcttattctgcctgaacagctgcgcaggctttgtagagcaggcaaaaggactggaaatggatgcgatctcttcggcggttatcggcggaacactgctttccggaggtgtgggaactccgatcggaaccatgttcggtgttctgatcaagggaactatttcaagtcttattacagcgcagggaacactttccagctggtgggtaagaatcgtactttccgcgcttctgtgcttctttattgtgatccagtctgtactggcttctgcaaaaaagaaaaaataaaaaagaaagatgatcggaccgtaataaccggcgcgagaaaaagaaatgggctgcttttaagcagccctgatatcgaggaggaaatgtgaaatgaagacagggagaaattataaattctggttttgtacaggatctcaggatctgtatggggatgagtgtcttagaaaggttgcagaacattccaggatcattgtggaagagctgaataaatccggcatatttccttttgaactggtgtggaaacccactctgatcaccaatgagctgattcgcaaaacctttaatgaagccaatgcagatgaagactgtgcaggtgtgattacctggatgcacacattttctcctgcaaaatcctggattttgggactgaaggaatacagaaagcctctttgccatctgcatacccagtttaatcaggagattccctacgataccattgatatggactttatgaatgaaaaccagtctgctcacggaggcagagagtatggtcatattgtgtcgcgtatgggaattgagagaaaggtgatcgtaggacactgggcagacagaaaggttcaggaacggctggcatcctggatgcgtacagcagtgggaatcatggaaagcagccatatccgtgtgtgccgtgtggctgacaatatgagaaacgtggcagttacggaaggggacaaagtagaggcgcagatcaaattcggctgggaagttgacgcttatccggtcaatgaggttgcagaatatgtaaaagatgtaagcaaagcagatattgatgttttagtagaagaatattataataaatatgatattcttcttgagggaagagacccggaagaattcagacgtcatgtggcagttcaggcaggtattgagatcggttttgaacgcttcctggaagaaaataattatcaggcaatagtgacacatttcggtgatctgggagctttgcagcagcttccgggactggcaatgcagcgcctgatggaaaaaggctacggatttggagcggaaggcgactggaaaacagccgcgatggtccgtcttatgaagatcatgacagcagggatcagggatgcaaagggaacctcctttatggaagattatacatacaatctggtgcccggcagagaaggaattctgcagtctcatatgctggaagtttgtccgagcatttccgatggaaaagtcggcattaaggtttgcccgctttccatgggggacagagaggatccggcaagacttgtgtttacttccaaaacaggtccggccattgccacctctcttgtagatctgggagaccgtttccgactgatcatcaatgatgtagagtgtaaaaaagcagagaaaccaatgccgaagcttccggtaggaagtgcgttctggactccgatgccggatctggcaacaggagcagaggcatggatccttgcgggaggcgcacatcatactgcattttcctatgacctgacagcggaacagatgggtgactgggcggctgcaatgggaattgaggctgtatacattgacaaagacacaaccatccgtaattttaagaatgaactgagatggaacgaggttgcattccgtaaataaccggatggaggactaaggaaaattcgggaggatttacaatgggtgtaaacgaagcaaagaattcaataaagaataataaaacagctctgggtattgagtttggttctacaaggatcaaggcggtcctggtagatgaaaataacatgcctattgcatcaggaagctatgactgggagaaccgtctggaaaacggaatctggacctatcatctggaggatattcatgcaggacttcagggcagttaccgggctcttgccgagaatgtaaaagaacagtatggcgaagagcttaccagcgtgggcgcgcttggtgtcagcgccatgatgcacggatacatgccgtttaataaagacggcgagcttctggttcctttccgtacctggagaaacaatatcacaggacaggcttctgaggaactgatggagctgtttcagtataatgttcctcagagatggagtattgcgcatctttatcaggcgatcctgaataaggaagagcatgtgaaagatattgattatatgacaactctggaggcatatatccactggaagctgacagggaaaaggatccagggaatcggagacgctgccggaatgttcccggttgattctgaaacaaaagattacaacgaggaaatggtgcagaagtttgataagctggtggagccatatggcttcccgtggaagcttcgcgatattatgcctcaggtcatggtggcaggacaggacgcaggctgtcttacagaggaaggcgcaagacttctggatccttccggaaagcttcaggccggaattcccatgtgtcctcctgagggtgatgcgggaacaggaatggttgccacaaacagcgtaagacagagaaccggaaatgtttcggcaggaacttctgtttttgctatgatcgttctggaaaaagctctttccagaccttataaagaaattgatatggtcacaacaccggccggagatccggttgccatggcacattccaacaactgtacttcagatctgaatgcctgggtaaatgtatttaaggaatttgcagaagctatgggcatggaagtggacatgaacaaactgtttggaacactgtacaacaaggctatggaaggtgatgcggattgcggcggtcttctgtcctactgttatttctccggagagcatatgaccggatttgaggaaggacgtcctctgtttgtccgttctccggaaagcagattcacactggcaaactttatgagaaccaatctgtatacctgccttggcgccatgagagtaggcctgaatattctgcttgataaggagcaggtaaagattgaccggcttctgggacacggaggtctgtttaaaacaaaaggcgttggacagcagatccttgcagacgctgtaaatgccccggtttctgttatggagacagcaggagagggcggcgcctggggaattgctcttctggcttcctatctgatcaataaagaagagggagagactcttccggacttcctggacagcagggtgtttgccggaaatgagggaagtactctggatccaaagccggaaggtgtggaaggctttaatatatttatggaaagatatatgaaaggtctgaacattgaaaaagcagcagtagagtctgaaatctggtaaaaataacaaaataaaaaagttcccgattttcatttgtacgaaaatcgggaactttttgtcttgttacagaaactgctgatcatggctatgaggtatgttcaaagcagttataaagtacagttttaataaggtcttccggtaaaaatagctacagatctcggcctcataatgaaatttcctgtaatccgtatttcctgcccctgagggtaaaaatatcgtccctgtccatcgccgtaagtattgacgctcagataccagaatccacgtttgtgaagatcaggaagtgtgatggaaacatcttcccagtaggaattaaccgcaatatatacaagatcatcttttcctttttcacggtcatatcctgcaaagcttacagcaaaggtataagcatctcttggaatggagatatcctgtgcgtttacattatgggtgtggatagagtccatgccgcatactgcatcaggaagttttttacggataacaagatgatcttttctgtaggaaatcataaacctgaaaaattcaaacagatctttgtttttttccagaagagtccagtccagccaggaaatttcgttatcctgacagtaactgttgttatttccgtacttggtatttccgaattcgtcaccggcaaggaacataggtgttccgcggctgcacaaaagcactgcgcaggcgtttcgtatcatgcggtatcgaagcttcagaacctcgggatcgtttgtctcaccctctgcgccgcagttccagcttcggttgtcgtttgctccgtctgtattgtcccagccgttattttcattatgcttttcgttataagaataaagatcatacagagtaaagccgtcgtggcaggtcagaaagttgatactggaattatagcctgcgtaattgccaccctgtgaatccttgtacataccgtaaagatcgccggagccggaaatactccaggcagcatcccaggaactccagcagtctcccttcagaaagcttctgagagaatctctgtatcttccattccactctgcccagcgtccgcttgcgggaaagcttcccacctgatacattccgcctgcatcccaggcttctgcgatcagtttgacattgcgcagaagaggatctgaggcaagcgtacggagaagaggaggattgttcataggggaaccgtcctcatttcgtccaaggatgctggccagatcaaaccggaacccgtctacacggtagttgaccgtccagtaccggagacattccaggatcatctgctgtactaccggatgattgcagttcagagtatttccgcagccgctgaaattatagtaatttccgtccggcgtcagcatgtaataaatattattatcgaatcctttgaaacagaaggttcttcccagttcattgccctctgcagtatgattgaacaccacgtccaggattacttcaattccgttgtcgtgaagggctttgatcagagttttcagttccgttccttcccggttgtattcattgacagaggtaaaacttgtattgggggcaaaaaagctgacagtattatacccccagtattccagaagacgctccccgttgatttctctggcattcatggtttcgtcaaactcaaaaataggcatcagctctacggcattgattcccagctctctgagataggggatcttttccatcagccctgcaaaggtgcctctgttctggactccggaggactcatgtacggtaaaacctcttacatgaagctcgtaaataataaggtcacagagttcttttttggactgaggcatatcgccccagttaaaggaatcttttacaacacgggcgtggtaggttggatcccagtgagtaccccaggtcctctggccggaaactgcctttgcatatggatccagaagaatattttttttgtcaaaaagcagtcccttttcaggatcccaggggccgtctacgcggtaggcgtattcaaagtcccggatatccagaccgtagacgatcatggaatatacgtcgccgattttataagcctccggaaagggaagaacagcaaaaggttcttcctcttcacggtggaaaagaagaagctcacaggctgttccgccacaggtgtgtatggtaaagttcacgccgttctgaagaggagtagctccgttcagatcaaacattcccggactgaccggaaatccggagatttctccggttggataaacatccagaggcgtttcggatacaaatttctgatgataggatttcataatagaaatagcctcctgtttttactattccataaaaagtttttcacattttgaaagtatgtcctgatttcttttttcgtaatctacatgcatggtatggatctttccttcaacaaacatttccattccctgaacaagaccgtcttcgctgttgggaagaagcgttcctccgtactgccggataaaagctcttgccccgtttacatcacaggcagctgcgggaacaccgagaatatcggcttcaggaactaccagtacctggccttcatagtaagaagacagcaggaaaaagtcgcaggcttttacgacagggaagggattgctcatatatttgatcaggataatgtgactgctggatttcacagatgctgccagttcacaggtacttgtgtacaggtttcccattcctccaatgatgatcagccaggtatcaggatgatttacccagaaacggtcaaatgcccggatcagtctctcatgacctttttccggggaaaaacggcctacattgataaacttgcgatcactgctgttcaggatttcctgaagtttttcaatggaaacagtggactctgtatttttatcaaagataagtggtttttcagatttagaacgaatgagatcaagatccatataattggaaatgacctggattttttctggatgccctccgattcgttctgctgcgccccttatatcctctcctacaggtattacgtgatcataggttgaataggctttttggagaagaggacgactgacattatgtttttttgtaatttccatttccatatcattatgggcccagatgctttttttacacggggcataactaaaaagtgcaatcatatagtttccgtatccgtcataatgaacggcatggtcaaaagagatacatccaaagtgttttttccattcccttttatatgcgtgctcaaggcgtttgccaatgccaaaagctgtaatcccccagttcatataaagaatctgagcagcagcagtcagtatatcaagattcatctcagtggcaagtggatagaaatggtatccctctgggatattattaagtttttccggatgatcctttatagaatgggttcggaaaacaatatagtattcacaggaggatggatccaaatgatgtataaggctataaaaggcagtggtaatcccattagggagaaggctgcctgtataaataaggacttttttcttttttgtgccgggcatagatgtacttttacatattttttctcccagaagaacatgatgacagatatttctggttgcatttgtctgttcgaaagtgcagtatttctggagaaaagcatcatccggatgtccggaatcagtattcagctcttttaccagctcctcaggagtacgtaccagtgggaaggggtaatcagagatatcttcatacattcctctgcttccctgatagtattcaagatcataagcaaaaagcaggatcctgcgaccggtaacagcaaaatcatacatgacactggagtagtctgtaatcagcacatcacaggcattgagaacttcataagtgtcatatccttccggaaagagacggatatgacggtaggaatttaatgttaactggctctgtacaaatggatgcagctttaccagcataatctgattttcatgaagcagtatatcaacgcggttcagatagtcttttatctgatttacatactcctcttcctgcacagaagaggaggttccacggaaagtaggcatatagatactcagctgtgtactggcatatccgagaagctctttcagttttgtaccctgctcaggatgaaagaatatgcagttgcggggatagccttcatgaagaacggtcccctgatagagctctttcagattatatgctccggacattttttcttccatataaagattagggaatacaagataatcagattgaagaagattccgcattacgtttccggtatcataccgttcttccggattgtcctgtcccattcgcttcagcggtgttccgtgccatacattcagataggtctgaccgtctttttttatgtagcggccggggaaagtagtatcattgatcagccatccggcttttgccagatgatagtaataggtgggttctctggtgtaaacaaatttatctactgagatcccgtaccgttccagttttttctgaatctgctcttttttgtttttctgaacagccaggactttataaaattctttatattccggctgattcagttcctttaaaatagcaaggatattgctctccagcgcaaggccgcttcgtgaaacaagaagaatttcttttttgtcaacaggaactttttcatagaaagtattataaaatggataccaggctccacttttgagttttttctttactttggatataaatgatggcataaaatcaccgccttaaaaatattttacagatcgtttgtcagatgcagtttatcaagtacataaaatacaaggctcagtatcatggcaaccacacaggcaagaaccattccggtaagttttacatttcccagattcagagcgattccggaaaggcctacaataaataccacagaagtcagcgccagattccgggattttccgtaatccacctgattatctaccagcatacgaagacctgaggttccgatcattccatacagcaggaaggagattccgccaataacaggccccgggatggtgttgatcagggctgcaagcttgccaaggaaggaacagcagatagaaagtacggctgctccgccgatgacctgtacgctgtagacttttgtcattgccattacgccaatgttttccccataagtggtagtaggaacagagcctaccagaccggaaagggtagatgagaaaaagtctgcaaaaagagaacggtgaagtcctggatctttcagaagatctttttctacaattttactggtaacgatctgatgaccaatatgctctgaggtaaccagaagaagcgctggcagaattgtcaggatcgcttcaatattaaaggacggcgcctggaagttgggcagagcaaaaaaggaagcttcttttactgccgtgaaatccagaatgccgcagaagcctgctgctgcatatccggcaatgatcgcgatcagaatcggaataacagacaggaagcctcggaaaagaatctggccaaatacagccactcccagagtcaccagaaatacgatcacgtttctggagtcaattttgtcatccagaagtccggcagtgctggcagcgcttcctgcaagctccagtccgatgagtgccacaacaggtcccatagcggctgtaggcagaacaacgttgatccagtcagttccgcagcggcggatgatcagtgcaaggatcattccggcgattccgagaaccacgaatccgcccagtgcatattcataaccgaacttgtctgcaaccagaaggcccggggataaaaatgcgaagctggatcccagataggcaggcgcttttccctttgtgataagaatgaacagcagcgttcccacaccgttcatcagaagtaccacggccggattgattccgaacataaaaggaaccagcacagaagctccgaacatggcaaacatgtgctggatactcaatggtatcaacagttttacaggtactttttcttctacttggataatttgtctttccactcttttcctctctttctcgtgagtacacgatgtaatcggaattattatagcataggagacaggggaatactattcaaattcataacaatcagtcataacttaagaaaatctaaaattttacatatcttatggtaaaatccacaggatagtgatatactatagcttacaggaaaacagtgcgggcagagtattcggatgtctgacctgcgtaacggcagcatggatgccgataaagaaagagaggatggtgtgcatatgaatatgaatacaaaaatcgaagaattgctggcagttttaaagaaaaaggaagacgacaaacagaaaaatacagtcctctgggtgttggcgatcattggtgctgtggcagcagtagcaggaatcgcgtttgccgtttaccgtttcttcgctccggattatctggaggattttgaagaagatttcgatgatgattttgacgattattttgaggatgaggaagaataaaaaccgacagctccggttgataccggggctgttttctttcaggtccgttgggcaaaaaacatgccatacctgagaatcacagaaaaggagatattaaggacagacattatatgaaaaaaggcgagatatacgaaggaatcatagaaaaagtggattttcccaataaaggttatgtaatggtggaggatcagaaagtacttgtaaaaaacggaatgcctggtcagaagatccgctttgttattcagaaaaaacgttcaggaagagctcagggccgtattctggaggtactggaaaaatcacctctggaaaaaagagagcctgtatgttcttcatttccccagtgtggaggctgcatgtaccagacaatgccatatgaagagcagcttcatatgaaggaaagacagattcgtgagcttctggaggaagtcctggtaaaggaaggacagacagacctgaatggaaaagcagattttgtgtgggagggaatccatggaagtccggaagagttctgttacagaaataaaatggaattttcttttggagatgaatataaggacgggcctttgtctctgggacttcacaaaaaaggaagtacctatgatgtgctaaatacagacgactgcaaactggtccataaagacatgacagatattcttacctgtgtgcgtgattattttctggaaaaaggggtaccctattataaaaaaatgcagcatacaggatatctgcgtcatctgcttctgagaagaggggtaactacaggagaaattctgatccatctggtaactacaagtcaggaggagcatgatctggaacctttaaaggatcttcttcttgcactgcctctggaaggaaaaattgtagggatcatgcatatcatcaatgactctctttccgatgtggtaaaaagtgacgagaccagaatcctgtatggtcaggactggttttatgaaactctcctggggctgagattccggatcagtacgttttccttttttcagccaaattccctggcggcggaggttctgtattcgattgtccgcacatatgttgaagatgcaagaggcatggaggtctttgatctttacagcggaaccggaaccattgcccagcttctggcgccggtagcaaaagaagtgatcggtgtggagattgtagaagaagcagtggaagcagccagacagaatgctgctctgaacgggctgtccaactgccgttttattgcgggagacgtactgaaggttcttgatgacctggaggtaaagccggatatgattgttctggatccgcccagagaggggattcatccaaaagcgcttccgaaaatcctttcctatggggtaaagaggatcgtgtatgtatcctgtaaggccaccagtcttgccagagatatggaaacctttcttcatgcaggctatcgtctggaaaaagcctgctgtgtagatcagttctgtcagacagtctggacggaggctgtggcggtatttgtcagggagtgataggcatggaaaacaaagtggagcgaaagaaaaaatttattataaacgttgtattttatgccctgatcgcggtacttgtatgggtcggatgcaaatatctggtttcaccgatgatgccgtttatcattgcttttctggtagcggctctgatccaggtaccggtaaggaagttcaaggtatcaaaaaagcagaaaaagcttttgtctattgttttttgtgctgtattttacgggcttttgcttttgctggcagcctgggccagtctgaagtttctggacggagtggaaaatctgatacggcaggttccgcatttttataatactacaatagttccggtatttgagacaatttccaattatctggaggagtccatgacatcggtacatccttctgtggcaaataccattgaaaattcctttgaggaaatgacaaataatctgggctcctatgtatccagtctgtctgtaaaagttgtacagatcatatccggagggatcagcggagtaccgggatttgttattaagcttgtgatcactgttgtggcaacttttttctttgttggggattatgatggaattattgcattttttaagaagcttctgacaccgaaacaggtagcgctggtggaaaaaggacaatcctatgtaaaaaacgttctgtttatttatatcagatcctacagctttctgttccttctgacctttacagagctgtgcatcggaatgttccttctgaaaatgccttatccggcgcttctggccctgtgtattgcagtgtttgatattcttccggttctgggaaccggcggtgtgcttcttccctgggcggcaattctttttattatgaaagaacatggactggcagtggggatactgattctgtatctggtgatccttgttgtgagaaatatggtagagccaagaattgtaggaaagcagatcgggctgcatcctctggcaacactggcagcgcttttcctgggactgaagctttttggtctggtgggtctggttgcctttccggtagccctgactgtacttgtgaatttcagcagggaagaactgatggaaaaattataaaaatatatacaagaagaaatataaaagagctgtggccctgggacacagctcttttatttgttttgattcaggggaaaacaggatcagcctgttttattctggttccgtgaagttgttttgttcagaaaatatgaaatatcagaaaaacttaccggccagaaaagaaataagaccgcctgccccacaaaggcacataacaagaatgggattccacttccactttctgagaatgaaaaaggctccaaggaaaagcagggcgttggtccagtcaacagaagagagagacacaggaagctctccccacaatgcggtctggctaagagaaaggcctgcggcagtaatcaaagccacaacagcaggcctcagacatccgagaactgtgtcaatggcagtggttcctttatactttctgtaaatcagtgaaagaagggaaaccaggataacggcaggaaaaatggagccaagagtggctgttacagctccgggcagtccggcaatgcgaagtcctacaaaagtagcagaattaattgccacaggaccgggggtcatggaagaaatcgtgataagattggtaaattcctgcatactgagccagccgtgaccgtttacaatttcactctggatgagcggaatggctgcatagcctcctcctacactgaaaagtcctattttcagaaagctgaaaaaaagctgtatatagatcatctggatacctccctgtgaaagcgccggattatcagaagcctgacagtcccaatgactgcagcagccagaataatatagatgacgcttacatgaaaaacaaaattcagaacaaaagcccctgccataataaaaacggaaaggctgctttttgttttaacagttgccatgccaaggtcgcaggcaacatccaggactgtggcggcaactccggcttccatgccgtgaaggacagcggatatcagagggctggaggcaaaggcggaataaaacaaggagatcactgaaagaatgatcataggagggagaacggttcccagaacagcagtaagcattcctgcaaatccgcagattttccagcctattaaaatggcggcatttacagctactgctccgggacaggactgagccagagctgcgaaatcaagcatttcctcctcatcgatccagtgaagatcatggacaaattttctgcgcataaatcccacgatcacaaatccgcctccaaaggtaaaagcactgatatataaagtggaaagaaaaagagttttcagttttttaagattttgatgcctgagaggtgtatccatggaagtctcctttttaaggtaatcagttatttgaataagactattatacaggaagaaacactttttgaaaataccggtgaaataaaacagaaagtaattgactttttcctttttcctgtatataatataaacaaacatatgaataactgttcatatgataaaacgtaaacgaaaaggagataaaaatgaagaaaacctataagatcgaagtagactgtgcaaactgcgcgaacaaaatggaagaggctgcaaaaagaacagccggagtaaaagatgccactgtgaattttatgatgttaaaaatgaacgtggaatttgaggatggacaggacccgaaggctgttatgaaagaggttctgaaaaactgtaaaaaagtggaagatgactgtgagatctatctgtaataagtgaaaggataaggtgcggatatgaacaaaaaacagaaaaaaatgctgactcgtatccttattgcagcaataatggttgcagcgttgtctctggtacctgttcaggggtatctaagggcagttctgtacatgattccgtatctggtgatcggatatgatattcttttaaaagcatggaagggaatcagaaacagacaggtatttgatgaaaactttctcatggcagtagctacagtgggcgccatctgtctgggagattttaaagagggaacagcagttatgctgttttaccagattggggaactgtttcagagctacgcagtgggaaaaagccgacggaatatcagcgagcttatggatatccgtccggactatgccaatgtagaaagaaacggaagtctggaaaaagtagatcctgatgaagtggagatcggcagtatcattgtagtgcagccgggagaaaaggttcccattgacggaattatcacagagggaaaaacaacgcttaacacaagcgctcttacaggagaaagcctgcccagagatgcaaaagagggtgacgagatcatcagtggatgcattaatatgacaggtgttctgaaaatccgcactacaagagagttcggggaatctacggtttccaaaatccttgatctggtggagaattccagttcaaggaaatccagatccgaaaattttatatccaaatttgcccgttattatacgcctgtagtctgttacagtgcgctggcgctggcaattcttccgccgcttgtccggctgatgtttatgggactggatccccagtggggagactgggtttaccgtgcgctgacatttctggtaatcagctgtccctgcgcccttgtgatcagtattcccctcagcttttttgcaggaatcggcggagcaagcaatgccggtgtactggtaaagggatccaattatatggaaactcttgctcagaccagatatgtggtgtttgataaaacaggaacactgacaaaaggtgtgtttgaggtctgcggtgtgcatcacaatgtaatggaagaccataaaatcctggaatatgcggcgctggcagagtgttcttcttcccatcctatcagccggagtctccagagagcttacggaaaagaaatagaccgtacccgtgtagaggacattgaagagatcagcggaaacggcgtgacagccagagtggacggaattcccgttgcagtcggaaacagtcggcttatggagcggctgggagttgcctttaaggagtgtcatcaggtaggaaccattgtccatgttgccattgacggttcctatgcaggccatatcctgattgcagatgttttgaagccaactgcaaaagctgcggtagcagagctgaagaagtcaggtattcgtgaaacagtaatgctgacaggtgatattgaccgggttgctcagcaggcagcagcagaaacgggagtagaccgggtatacagtgagctgcttccggctgataaagtgacaaaagtagaagagcttctggagaaaaagaaccccagagaaaagcttgcatttgtaggtgacggaatcaatgacgccccggttctttccagggcagatatcggaattgcaatgggagctctgggttcagacgctgccattgaggcggcagatgtggttctgatggacgatgatcctctgaaagtagtaaaggcagtaaggattgcaaaaaaatgtatgaggatcgtttaccagaatatttattttgctattggaatcaagattctgtgcctgcttctgggcgcagtgggaatcgcaaatatgtggattgctatttttgcagatgtaggcgttatggtaattgcagttctgaatgccattcgcgcgctgtttgtaaaaaaattataatacccgtgcagaaaatccctgcatgtgatatgataaaaaggaaaggcagggaaattacatggcagaaacaaaagagagtctgtgctgtgatacagaggaaattcatgaggagcttttaaaaatcgtggatgagacaatgcctgatgagacagaactggattcgctggcagagctttttaaggttttcggagatcctaccagaatcaggatcctgtttgttctttttgaaacagaggtgtgtgtctgtgatctggcaagagcgttgaatatgacccagtcggcagtttcccatcagcttcggatcctgaaacagagccgtctggtaaagaacagaagagaaggaaaatccatgttttattctctggcggacgaccatgtacgaacaatgatcgcccagggaagggaacatatactggagtagagataagctgctgtttatatttcttacagtaacagaaatttcagaaaagaggctgtgaaaccacagcctgtaaaaagaaggatcaggggttcgcaaagaatccgggatccttttttgtctgccgggaaagtcgtacattccatactgatttttcagtggatgtatgataaaataaacaggtaactgtaagtgaataaatattaaaatttatatcgctaaataaggcagtacagaattttgcgcaatagaatctataatatatggacacaaataaattttaaactatatatgtgcatccagcaaagacagaacaacgagaatgtgtaccttttgatttgatcatttacagcaggtaatccgggatgtattctgagcaggttatggggaatagtgatcatatttaatgaagaggaactggtttcttctgttatgcaacagacagaaacggataaagtacacagttttgtgaagtgcagcattatgattaaggggggaaacgggtgaagaatcaggaactgtatcagattatggcagaccatatggagaagaataaaaatatgctggccacagtaatagaaggagaaaatacaggaaaacgtctcttttttactgagggcaggcttgtggccgaaagcggagaagacaggctttcaccagagctgataagccggctggcagagacagagcaaagcagtattattgaagcggacgggtgccggatttttgtggaactgttgggaaaacccggaaagcttgtgatctgtggcggaggtcatgtggcgcagcaggcagtaattctggcaaaacatacagggtttcatgtgactgtgcttgaagatcgtccgttttttgcggatcaggcccgggcggcaggggcagatcaggtaatctgtgatgattttgcttcagccctggaaaaaattcccggaggcagtgatacttattttctggttgttacaagaggccatcggtatgatggaatctgccttactgcaattttgaaaaaggaacgggcatatgtgggaatgatggcaagccggaagcgcgggatccttctgaaaaaaaagctggtggaagagggatttccggaaagtgaggtagaacgtctccatacgccggtaggactttccatttatgcggagactccggaggaaattgcagtctccatagtggcagaactgattatggtaaaaaacagtataaaaaaaacaggcggatatgataaagaacttctggcatgcctgacaggggaaagctatccggagcagaaaaaggctcttgcgactattgtggcaaggcagggctctgctcccagagaaatcggaacaaagatggcagtactttcagacggaagaatcgttggtacgatcggaggcggatgtatggaaagccgcatccggaatcagtgtcttcatatgctgaaagaggaaaatccccaaagccgtcttgtgcttgaggacatgtccggacaggaggcagaagaggaggggcttgtctgtggaggaaggatcagggtttttctggaagtactgtaagcgtgtatccgaaaatacagtgatcagactgcggagtggagatattatcacagagttgcggacattatggaataaacaggaagattttctgatatattcagatgattctatagcaggaaatgaatgccgtatggcgccaaaaagggaaacggcagttttgagggtatataactgccgtgagaaaatatggaatacaaatatgccggaaggtgtgttataataaaactcacagcaggttccgcaaaactgtaaacggaacagagaatatcagaatgtcagtttcagtatattttacttttaattaaacggaggacaggattatgaaaaaaagaagtgtgatcgcagcattactttgcagcttgtgtctgacagccggaggtgcggttccggctatggcagattcagccagagttgtaacacttggcgcagaccttacccaggatcagaaggataccatgatgcgctattttaaaacagatgccagccaggttcagatccttactatcaccaatcaggatgaaagagagcatctgggagattatatcccgctggagcagattggaacaagaaccctgagctgcgcttatgtaaaacctacacagtcaggcggaatcaaggtccgtactgcaaatctgaattatgtaaccggaaatatgatcgccaatgctctttctactgcaggagtaaccaactgtgaagctgttgcggcatgcccttatgaagtatccggaacaggcgctctgacaggtgtgatcatggcatacgaaagcgcaagcggacagaagcttgacagcaccaaaaaagatcttgcaacaaaagaggttgtggtgaccggtgatcttgcgcagcaggtaggaaacgataatgcgaccaatatcatcaatcaggcaaagcttcagatcattggcgataatatccagaacgcagatgaaatttataatattgtaaacaacattgctgttcagaataatgttactttaagccaggaggaaatggaaacgatcgttgctcttcttcaggagatcgcgcagcagagctacgatatcgagcagatgaaagagactctggaaaatattcagcagaatctggataaagaagctgcagatgatcctgtttttgacggaacagctcaggatgacggcgtagttgatgcagaggatgacaatctggtagacgaggacagtacagacggagaagatattacacagaatgtagatccggacgctcttggtgaagacattaaagaaagctccacagaggatccgtctcttcaggaagaaaccatgggagaggctgtggaaggcgaggacggcgcagttgatgaagaaacaggaatccctgaagctacagaggacggaaccgctcttgacggaacagcccaggatgatatggctgtagctccggaagaaaatacagaggagattccggaagccacagaggacggaactgttcttgacggaacagcccaggatgacatgagtgtgacaccggaggaaaatacagcagaagatcctctgaatacagattctttaagtgaagaagcaaaagcatcctttgaacaggcaaaaagcttctgtaagggagagtatgagggagatacggcttctcttcagagtgtaatgggagaggatgccatggcatcagttacaattacaccggaggttggtgcagatctgtctcagaaggtactggaatcctatatcaaggtactgaaagacggaggaatgagctatgttccggctgatacagacatatatctgtcagcagagctgaacatggtaaatgcagagatgagactgatcttcagtatggaactggatccggctgaggatgacattctggtaaatgaaacaccggagacaagacaggcactctacagtgacactatgaaattctttgaaaatctgtatggagagagcagcgtttctgctgaaaccacacaggaagaagtaatggaataatcctgcatatggcggctgtgccatatcgggcaaaagggtgttttgcccaggagcagatatgagttaagataacatattaagatctcagtattagaaatagtactggggtcttttattttcgggagagagtatctcaggtacaaactttttagtataacaaaacattccacaaagattttaggataagcagatctgtcctttttgtttttacaaaatacggaaaagtcacgccagaatatcatccttcatagaatgtgattattttgtgtcttagcggaaatactggaaaattcagactgtgtgtgctacaataaatggaaatgctgacgaatacagtggaaatatgtttccgaaaggagaagaatacatgagtctggcagtagtaacgctgaaaaagggggaaggacgcctcctgaaatccggcggaatgtgggtgtttgacaatgagatagcctctgtgatgggaagctttctcaatggagatattgttctggtaagagattttgacggatatcctctgggcagaggatttattaataccaactccaaaatcacagtgaggctgctcacacgggatgaaaaccagaagattgatgagaaattccttgagcagagagtaagagatgcctgggaataccggaaaaaggtaacagatacaggaagctgcagactgattttcggagaagctgattttcttcccggacttgttgttgacaaattttctgatgtgcttgttgttcagtctcttgccctgggaattgaccgcctgaagctgcagatactggaacttctgaaaaaggttctggaagaggacggtattgctgtcagaggaatttacgagagaagcgatgccaaggtaagacgtcaggagggaatggagctttacaagggctttatcggtccggaatttcctactttggtagaaatcgaagagaatggggtaaaatatcaggtagatataaaagacggacagaaaacaggatttttcctggatcagaaatataatcgtctggctatccagaagctctgcaaaaatgcaaaagtgctggactgctttacccataccggttcttttgccctgaatgcaggaattgcaggcgccagtgaagtgacaggagtagacgcctctcagcttgctgtagatcaggccactgccaatgcacggctgaatggacttgacggtacggttaagtttatctgtgaggatgtatttgagcttcttcctgagcttgaggaacgcggagaaaaatttgacgttgtgattctggatcctcctgcttttacaaagtccagaaattctgtaaaaaatgcggtgaaggggtacagagagatcaacctgagagccatgaagctggtaaaagacggcggctttctggcaacctgttcctgttcacattttatgacctatgagctttttacaaaaacagtcggacaggctgcgcgcagcgcccataagagactgaggcaggtagagtacagaactcaggcaccggatcatccgattttatgggcgtctgacgaatcctattatctgaagttttatatttttcaggtgtgcagtgaacgataagtaaagacaggagatgcattgacatgaaggaaaagtttataaaatttatggaaggacgctatggtgtggacggatttgcacggtttaccatgggagttgccctggtatgcattgtggcttctgtttttttccgtaatggaagcaccacgggagcgattctgaataccgtgggtctggctgccatcatttatacatattttcgtatgctttccagaaacattcagaaacgttatgcggaaaatcagaagtatctttccatgacagcaaaaatcagacagtggttcagaaaagaaaaaaatatgatggaacagagaaaaacacatcatatttatacctgtcccagctgcggacagaaaatcaggatccccaggggaaaaggaaaaattgagatcgactgtccgaagtgtcatacaaaatttatcaaaaaaagctgaaaagcctgaggataagcaggaggagttatgtttgggtatgttgtgatgaaccggccggaaataaaatttaaagattatgatctgtatcggtctttttactgtggattatgcagggaactgagggagcgctatggaatctcaggtcagatcacactgacctatgatatgacttttgtaatccttcttctcagcggtctgtatgaaccgcccacaaaaaaaggaaccagccgctgcatggttcatccggtgagaaaacagccggtacgcaaaaataaagtgacagaatatgcggctgatatgaacgtgtttcttgcttattacaaatgtgtggacgactggaaggatgaaaaaaagctttccagactggcatacagcagacttttgaaaaataaggataaaaaggcggaagctctctggaagaaaaagacagcagtcattataaaacatctgaatgagatttctgccatggaaaaagcaggagaaacggatattgataaaatatctggatgctttgggaaaattatggaggagattcttgcctggagagaggacgaatgggaacctgctttaaggcgaatggggttttatctgggaaaatttatctatctgatggatgcctatgatgatgtggagaaggatctggaaaaaggaaattacaatccttttgctcaggattatataatggaagggtttcaggaacgcgtatgccagatactgatcatgatgatggctgaggcgtgccgggaatttgagaaacttcctattattaaatatgcagatattctgcgaaatattttgtactccggcgtatggtgccggtttgaggcagtttcagagcaaaggaagaagaaacaggagaaagaacatgtttgatccgtacagtattctgggtgtgtcgagggatgcatctgatgaggaaataaaaaaggcatacagaaagctcagccggaagtatcatccggatgcaaatatcaataaccccaataaggaccaggcggaggaaaagtttaaagagatccagcaggcctatgatcagatcatgaaagaacgggagtatggttcttcgggaaattatggatatggcggaaatacgggatatggaggcttcggcggatttggcggctatggcggaagtcagagcaatagcggatatcaggatgaggaggccattcgcagacaggctgcttccaattatgttcagagcggtcattatcaggaagcaatgaatgttctgtcctcattaaaagaaagaaatgctcagtggtattatctgtcagcggttgccaatatgggacttgggaataatgtaaatgccatgaatcatatccgtgaggctgtgcgtctggagcctgataatatgcagtaccgcatgatgcttcagcgtatggagggcggcggaagctggtatcaggaacagcagaatccatttggcggaatgcccacagctggcaatgatctctgtatgaaatgtctgatggcaaatcttgcctgcagctgctgctgtccgggaagcggagtcatctgctgctgacagcgatggtacagaccgccgcgaatggtaatgtaatgtaatatgccattaccgaagatcatttgtaatggattctgaccaggttgccgtaaatgaagcgaacagtaactgatgcggcagaaatttgtcaggaacaaaagaaaaaaattgacattattcctctggaagattaatatataagcagaaaaaacgaggaggaaattattatgagtattcgaattggaatcatgggatatggcaacctgggcagaggcgtggaatgtgcagtgaaacacaatccggatctggaacttgcggcagtttttacacgccgtgatcctgagacagtaaaaatacttacagagacagctaaggtctgccatgtggacgaagcagagaagatgaaggacgagatcgacgttctgatcatctgcggcggaagcgcaacagatcttccggtacagacacctaaatatgcacagtggttcaatgttgtagacagctttgatacacatgcaagaattccggagcatttcgaaaatgtggataaagcggcaaaagaaagcggccatgtgggaatcatctctgtaggctgggatccgggaatgttctctctgaacagaatgtatgcaaatgccattcttaccaatggaaaagattatactttctggggaaaaggcgtaagccaggggcactctgatgcaattcgaagaattgacggagtaaaagacggcaagcagtatacaattccggtagaggctgctctggaatctgtaagaaacggagaaaatcctgagctgacaacaagacagaaacatacaagagaatgttttgttgttgctgaagaaggcgcagatctggcccgcatcgagcaggagatcaagaccatgccaaactactttgccgactatgatacaaccgtacattttatttctgaagaagagctgaaacgtgatcacagcgggattcctcatggcggttttgttattcgtaccggaagcaccggatgggataacgaaaataagcatgtgatcgagtacagcctgaagctggattctaatccggaatttacatcttccgtgatcgtggcatatgcaagagctgcataccgtatgagccaggaaggacagaaaggctgcaaaactgtttttgatgttgcgccggcatatctgagcgctatggacggagcagagctgagaaaacacctcctttaaaaataaataagacaaatattacaaaagagtgaagtcagaaagactttgctcttttttgttctgttttacaatttgtaataaaaatattgacgcatggaaaaagttgagatataataaatacacaatattgtaacaagattgtaaaaaataaagtccgagaagaggaaatgtttatgaataaggtatgcaagcgctggaaattctggggtattttactggggctgatgctatttgcagccggcttttccatgcattccactactgtagaagttcaggcggcacctgtgaatggatttcatacagtaggtggaaaaacatattattataagaatggcaagaaaatgaccgggactcagaaagtgaataataagtattattattttgatcccaatcagtcaggtgcaatgttgaaaggctggtacaagaacagtaagggtgacagacgttatttcgacaaaaagacaggggaaatgcgaaccggactgagaccgattaacagtgagtattattactttgatgcaaaaacaggatgggctcagaaggggttccagacagtcaacggatatacacgatattttcagcctgcaacatttaccatgtctaccggatggatgaaaaattcaaaaaatcagaaatggtattttgaaaaaggaaacggacgaatgaagacaggattgcgtcctattgatggaagatactattattttgatcctaagacaggagctgcaaaacagggattcattgagttcgaggttggaatgagatatttttatggtggaggaacctatgctatggcaacaggatggcatacttcaccagagggagagaaaagatattttgaccctaaaacaggtgtcatgagtaaggcaaaaaaagaagttgacggaaactggtattatttcagcaaaatcgatggtgttgccaaaggcggatggctgaatgaagacggtcgaaaaagatactttgatcctaaaacattaattatggtaacaggaacaagggtcattgacggaaaaacttatacgtttgattccaagggacttttgatttcttcagaggatgattataataagcctgtaactccatcaactcctacttctgaacgtactgttaagaactatcttttaaatgcattgcaaccggtaggaagaacattgtacatctggggtggagggcataatgacacagattccacacgaaagggaatcagccctaagtggacatcattcttcagtagtcagaacagcagctataattacaataattacagatatcagacagaactcggacttgactgctcgggatatataggctgggctacttatcaggtaacaggacgttattccacagacgtttcaggaaacattggaagtttgtataaaggatacggttggggtactatctgtaatcaaaattatctaagcagtcatgattataaactgtatccgggggatataggatatgatgagaatcatacctggatgattctgggacaatgtaaagataagagtgcggtgatccttcactccacaccgaatgcaggtgtacagatttccggaacgcctacaccgaatggaaattatggaagccaggcaattgcccttgcagaaaagtatatggaacgtttcccggggtatcagaaaatgcagaagaccaacagtagcttctaccatacttcatcaggcgcttatgtccgtagaggaaattacttcagatggaattcttccaccctgagtgatccccacggatataaaaataaaacagcagatcagattcttgcagatctgtttagttaaataaaagtaaatataatgatttagaaagagatgtttcgtaagggagcatctcttttttgtactatctgtaataagtacagtatggaaaagattgaagatgaaagagcatttcttttttacagtttggacattgcagaggatcatagactatagtaagtagaaacagtgtacgccaggtattaaaatcaagaaagttccgatgttttgatttacggacagttttatgtagctaagtttcgatttcgcggtatttggcacaaaatctatagtagcatatcattttgaaattttttcaaggatatgctggatgagtaatttaataaaattaattgccggaagagtttttatgataaaaaatcaaacagaaaaacaaaatctgctgcggttaatggattaggatgaaataaacatttcaaaatatgaaataaaggaattatgtgataaaaaacttttctttttttgagtcttttgtcaatggaattttacagaaaaatattttacaatagggacagtaaaatcaatgaaacagagtagcagaagaacagtattttaatagtttctgtaagacaatttattgaaattgggaggtaaaagatgaaggttggatttatcggacttggaattatgggaaaacctatgtgcaaaaatctgattaaagcaggtcatgatcttatcgttactactcataatccggataccttaaaagagatggaggcgctgggcgccaaagcagttcataatggaaaagaggtagcagaagaagcagaagtgattattaccatgcttccaaactctcctcaggtcagagaagttgcgcttggaaaaggcggaattattgaaggtggcagaaggggaattgttctgattgatatgagttccattgaccctacagagagcaaagcgatttcggcagtacttgcagaaaagggaatcgatatgctggatgcacctgtatccggaggggagccgaaagccattgacggaacgatttcagttatggttggcggaaaaagagaaacctttgataaatactatgaacttcttatgaatatggcagggtcagctgtctatgtaggtccgataggctccggaaatgtagccaagcttgccaatcagattattgtagcagtgaatatagcggctgtttcagaagctctgactctggcgacaaaagcaggtacagatcctgagcttgtatatcaggcgatccgaggaggacttgcaggatccacggtgcttgatgcaaaagctccgatgatgatggacagaaattttaagccgggatttcgtattgaactgcatatgaaagatctgaacaatgcattaaatgcaggacatgcggtgaatgcagcacttcctcttacagcagagcttatggaaatcatgcagtctctgaaagcggatggctgtgaaaaggaagatcacagcagtattgtaaaatattatgaaaaaatttccaatgtttttgtagagcgggaaaggaagtaaaaacagaaaatttctttgatgcatccccggtcaggtatgccatgagcctggccggggatacttgtatatggtacttgaggattacgaaaaggagaaataattatatgtcaaaaatagcagttcttcttccaaaagagtatatgctggaacaggcgcgcaaggtgatacaggaaaaaaatgcggatataaatatattgaaagtaataaaaacatcagattctgtatatgaagcgcgtaaggcaatggagcagggggcaggaatcattgttgcccggggagtgcaggcagcatatatcagagaatataccaatataccggtggcagaaatcatactgacaggtcaggaaatagcgcttatggttgcggcggcaaaaaagattatacctgaaaagaaacatccccagattgccctgatcggttttgaaagtatgttcagcgatacatcttattttgatgagctgtttggaatcacattaaaaacttattttatgaaaagtatggagcaggctgcagaaaaggtggagcttgcgatcgcagagggggcagatgtacttctgggaggagatacagtgaacagtcttgcttcacaaagaaattttccctcctgttttataaattccacagaggagtctatacgttcagctcttgctatggcagagcatatggcgttgtcagcagaaacagaaaaaacatatgcggcgcagtttgaaacagttcttgataatgccaataatggtatttttgagattgacgaaaaaagaaaaattacaattattaatcgtacagtagaggagctgctgaaaaaatctgccgagaaggtgaaaggagaggctttagaaagcttttttccggagcttgatataaaatatgtcaatgacgtactggaaggaagaagggatatgtttacaacttctacatatcttgccggaataccgatgatgataacagttgctcctgttcagtatgaggaaaaaatctgcggcgctatcataagctgctacaggtatatatcagctcaaaagagcagtacggacgagctgcattctcattatttgaaaggatatgtggcgaaagcacggttttcagatatgagaattaccggaaaagagatggaatattgtgtggagctttccagaatgtatgctctttctaaaagtccggtattgatacggggggagggaggaacagaaaaagagttcctggctcagtgcatccataataatagttcttataaaacaggaccttttgtgacgatcaactgcagcggaatgtcggagcagatgcagatggaccgtattttcggcaatccggcttctgatgatatcggaattcagaaaggcggacttgcagtgggagatcttggaacagtacttatcgcagagattgaaaagcttactcctgtgtgtcagtacagactgtatcgcgccatacggtatgaggatcttattcagaacgatttagagcgaagccagactcttgataatcgtattatagccacaacatctgttgatttgggacagcttgtaaaggaaggacggttcagagaggatctgtattatcttttgaacgggcttgtggtagaaataccgccgctccgcaaaagaaaagaggatattcgctctatagtcgaagaatgtcgtacaaaattttcaagaagatatgcaaagtttcctaaaatatcagaggatgccatggaagcgctgatggaatttccgtggtcgggaaatgagcttcagctggagaccttttgtgagcgtatgctgctgacaaccatgaaaaaaaccattgccggtgattttgtacattttcttctgaatgaactttatccgcagacggaaagtgaacaggaggacggaaaaacagttatttatcagcatcctgaggctgctgaactgcagacccttctggaaaaatacagaggaaacagaagcgcagtggcaaaagagatgggaatcagtacaacaacactgtggagacgtatgaaaaaatacgggattataaaccggtatgatttactggaaagaagacagtcggctgaaaaggatgttttcaaataaaaattttcaaagtcattttttcagaggagataaaaattatggcaattcatattattgatgaggcaaacagatgccttaactgtaaaaaaccgaaatgtatggaaggatgtccggtgcatacccctgttccgcatattattcagctgtttaaggagcatcaggttatggatgcgggaagagaactgtttgaaaataatccgatgtctctgatctgctccattgtatgtaatcatgaaatgcagtgtgcagggaactgtgttttgggaaaaaagggaagtccggtacacttttccagtattgaaacctatatttccgatatgtatctggacagaatgaaggtaaaaacagcagaacagaaaaaacagaatgtggctgtcataggagccggaccggcagggatgacagtagcggtgattcttgctcaaaatggatatcaggtaacgatttttgaacagcaggataagatcggcgggattacacagtacggaattccggagtttcggcttccaaaaaccattctttccagatatcagaaaaaacttctggaactgggaatcagaatacgacccaatacagccattggcacaaccctgaccattgaagatcttcttcgggacggttatgccagtgtgtttgtgggaacaggagtatggaaggcgagaaatcttggaataccgggagaatgtcttgcaaacgtgcattttggaattgattaccttgccaatccttctgcatacagtctgggagaaaaggttgctgtgatcggtatgggaaatgcagcaatggatgtagcaagaactgctttgagaaacggcgctcatcaggtgaccatgtatgtccggggcagacggatagctgccagttcccatgagatggcttatgcagagctggatggcgcagagtttgtttttggaaaagcaattgagcggatcacggagaaagggcctgtatttaaaacttccattatggatgagaataacagagtaacaggatatgaagaaggagaagagcagacagaggcggattctacgattattgccatcagtcagggacccagaaaccgtctgatccgtactacagtagggcttgagggatcagacaaggggcttctgatcgtagatgaaaatcatatgacaaccagaaaggggatttttgcggcaggagatgtggttacagggtctaaaacagttgttcatgcagtagaagctgcaaaaaaagcagcagaagcaatgatgcgttatatggaaaaagaaggagcatgatcaaagctcctttttccagaattcttccgccagagctatgaagtctctggtggatttgcttatatagcggtttttgtggcagcaggccataatattccatgcagggttatccggaagtgtaaaatagcggatgccatatggagaatttctggcatagtattctggaatgagtccgcagcacatttccgcatgtatcatagtggcaattgtggcgttattagaggtctcaaaaagtacatggggagtaaatccggcttttttaaaaatctgatctgtcatttcccttaaggtagattcctggtaggtgagaacaaacggctcctcccggagccggtaaagatcaagctcctgaagttcggaagacatatcagtcatatcagcaacaggtgtgccgtcagagctgtccagtggagttgccaccggatggcggagaggaacaccggccaaaattctttcttcagaaagatttatgtatgtaagagaagccttctgctgggaaggcgttaaggtgacaaagcccagatccaggctgccggacagaagaagcgactgctgtttctgtacactgagctcccttggtataactgtgatatccggatacatcctgtggaatcggggataaatatgagagaacatgataatgccccgtccgggagtaaatccaacggaaagctgtcctttttgaatttcagcaagatcgtggatccggtaataggtatcttttttcatctgaagcattttacgtgctgcgctcagatagatttctcctgcttctgttgggtgccagtcagtgcgtgaacggtgaaaaagcgggacaccaagttctttttccagcttcagaagctgttgattcagggcagactgagtaatataaagcttttccgctgcccgggtaatattattttcttctgcaatttgtacaatatattcaagctgtcgtaaatccatggcaaattcctttctaaaaaatatggtttttcatcaatatcaagaggcagagacgcagctgggataataagagctgattttactttaccatttttttatcaaaaggtctatacttctattaataaaattaatagataactaatatttattaattttacttatacaatatcatatattataatagtagcataaaaacaaaggaggaattcccatgtcactcttagtgaaagttcacagttctgataatgttgccattgctgtgaaacaactgaatgcaggaactgagatcgaaggtctgcatattaatcaggatattccccaggcgcataaggttgccctgactgacattccggcagggagcccggttatccgttacggcgtgattctcggttatgccatgaatccgatcaaacgcggcgactggatcaatgaatttatgctggagcttccgacaccgccgtcggtagataatatggaatatggaaaaaatattgtaaccgaacttccggagcctccggtaactacatttgagggatatgaaaatccggatggaggatacgcgggaacaaggaatattctgggaatcagcacaacggtacagtgtgtgacaggtgtacttaatgtagcagttaaaaaaatgaaagaagaacttcttcccaaatacccgaatgtagatgacattgttcccattaatcatgcatatggctgcggtgtcgctatcaatgcgccagaggcaaaggttcctatacgggctcttcgtaatctggcaaagcatccgaattttggcggccagcttatggttgtaggacttggctgtgagaagtttacagtagatatgcttcttgaccaggcagacatatcaccggaaaatgtgattattttgcaggaattaaggggatttgacgctatggtggatgcgctgatgaaaatggcagataagaagcttgccattttgaatcaaagaaagcgtgttacgcttcctctttcaaagctttgtatcggaatgcagtgcggaggcagcgatgctttttccggcgttacagcgaatccttcagccggttatgcagcagatatgcttgtaaaaggtggagcaacggttctgttttctgaggtgacagaggttcgtgacggagtccattatctggcagaacgctgcatcagtcctgaggtcagagataaactggcgacagaaatgcgctggtatgataattaccttgcagaaggagaggtggacagaagcgccaacccgacaccgggaaataaaaagggaggtctctgcaatattgtggaaaaggcaatggggtccattgcaaaatcaggaacctctcctattgtagaagtgctttcaccggcagagaagcccggcagacacggactcatttatgcggctacacctgccagcgatattgtctgcggtccctgtcagcttgcgtcaggaatcactgtccaggtatttatgaccggacggggaacgccttatggtctggcagcagcacctgtgatcaaggtttgttcaagaaatgaaatgaaagaaatgtggcaggatctgattgatgtaaatgcaggccctattgctatggggcaggcaacgatccaggatgtcggaacagaactgttttataagatcattaacgtagcaagcggaagggagcagtcctttgcggaaaaatacaagcttcacaatgatctgtgcatttttaaccctgcgcctattacctgattttgtttaccatattcgatggaaattcctgtttaccctctttcttttgggaatttccataaaaagctgtcggtatatgctggcagcttttttatgtgaaaaaacaggacggataaaaaattttacaatgtaaaagttatgtaaagtggaaaaacaaaattctgtgaaagaaatgaatatttttgaaataaaaatgaaacagaaatatttcataaaatgaaagattgaagtatatatataaaaattacctgtttatcttgagtattttgcgaattgaataacaaaagggattgtatataataaaatgcatagaaaagaacggtggccgtaaccttttaagcacattgaggaggatatattgatgataccagttgtagaaaaaatggaagtttatccggtagccggacatgattgtatggaacttaatctgtctggcgcacatgctccatattttacacgaaatattgtaatactgacagattctaccggaacagaaggagtaggagaggttccgggaggagaaaaaattacaaaggcactggagcaggtgaaagaccttgtgatcggaaccagtattgcggattataagcagaccttaaataaggtacgcggctggcttgacaaaaatataaaggatgatgtccgcggacttcagacctttgatcttcgtacaggggttcatgtggtcactgctgttgaagcgccgcttctggatcttctcggaaagtttcttgaggttccggcagcagctcttatgggagacggaatccagagagaacgggtacagttcctgagttatctcttttacattggggatcgtaaaaaaacagatcttccatatgaagaagagccggatgcagagtgcgactggtatcgtctgcgccatgaggaggctcttaccccggaaagcattgtagcgcttgcaaaggcaactcatgagaaatatggctttgtggattttaaattaaagggcggcgttcttcctgcaaaagaagagctgaaagctgtccaggcaattaaaagagaatttccaaatgcccgggtagaccttgaccccaacggatgctggagccttgaagaagcactggaaattgcgcctcagctgaaagagtgtcttgcttactgtgaagatccatgtggagcagaaaacggattttccggccgtgagatcatggctgagtttaaaagagagtccggaatgcctactgcaacaaatatgatcaatacagactggcgtcagatgtgccactgcctttctttaaaaagtgtagatattccgctggctgacccgcatttctggaccatgaacggttctgtgcgggtaggtcagatgtgcaatgactttgggatgatgtggggatgccattccaataatcactttgatatcagtcttgcaatggttgttcagtgtgctgctgcaattcctggaaaaatgaacggaattgatactcactggatctggcaggagggacgtgagcgcctgacaaaagagccgatgcagatcgtagacggatgcattgatcttccgaaaaaaggcggccttggcattgaggttgaccgcgaccaggtactgaaggcacataagctttacatggacaactgtcttggcgcacgtgatgatgcaaagggaatgcagtatctgatccccggatgggaatttgataacaaacgtccgtgtctggttcgctagacaatgtaaaaaacagtttacggtctgtcaaaaaaccggatacataaggaaaaggagagaaaaacatgtctgaatcaacaagaatgttactgggacttgcattaggtattattgttatgattctcctggtaatgaaaacaaaggttcattccttcatggcgcttcttattgcagccatgattacaggaatcatcggcggaatgccgatttcagacgtaaccctcgctgacggcacaacacagactggtctgatcactgccattcaggatggtttcggaagtacactgaaaagtacaggtattatcattggtcttggagttatgatgggcggtgtccttgaaaaatccggcgctgctgaaaaaatggcatacagcttcatcaaactcattggccagaaaaacgaagaatgggcgctggcaattacaggatggtttatttcaattccggtatttgcagattccgcaatcgtgatctttgcccctctttgtaaagcaatgtccagagtaaccggaaagtctgttatcggtcttgccctttctctggcggttggtcttcagcttacacactgtcttgttcctcctacacccggcccgctgacagcggcaggtatgctgaatgtagacgtgggaaccatgatcatcggtggagcgctgatttccattcctatgctgattgtagtcgttttctatacaaaatggattggaaaacagatttatcagattcctactgcagacggtggatttgacagaaaagaattcaaaaaagaatacatcaaatccatggacgagctgaacgcaatgatggatgcaaaaccgcttccgggattctgggtatccgtagctccgatcatcattccgatcgtcctgatccttctgaaaacagtccttgatttcgtaggtgtcggcaatgcatttatcgatttttttggttcaccgattgttgctcttggaattggtactcttcttgctatttacggtctcgtaaaaaaagaagacaataaaaaagtccttggtatgatggatgaggcaattaaggataccggtatcatcatgctgatcacaggagcgggcggaagtcttggaaacgtagtgaaagtcagcggtatcggtacagctctgggtgagatggtaacatcctggccgattccggcagttttgattccgtttattattgcagctcttatgcgtattgctcttggctctgcaacggttgccattacaaccgcagcgtctcttacggctccgcttatgagcgtactcagcatcagcccgctgcttatggcgctttcctgctgcgtaggcgcaatttctttctcatattttaacgacagcggtttctgggtattcaatggtatgtttggccttacagagctgaaagatcaggtaagatgtaaaacagccgtttccatgatcatgtcaggagtaggtgttgttgagcttctgattgcacagttctttatctgatatttgacagtacagcttcctgtctctgcttcacagcagcaggacaggaggccaccctcacagcttattaaaattaaataaatatataaaggagattttaaaatgaaagttggatttattggacttggaattatgggtaaacctatgagtaaaaacctggtaaaagcaggtcacgagcttgtggtatttgatttcaatgaggcagcggtaaaagagcttgcagatatgggagcagttgctgcaaagagcagcgctgatgtagccggtcagtgtgatgtgatcatcactatggtgccaaattctcctcatgtacgtgcagtgtgccttggtgaaaatggtatttctgatacagcaaagccgggaacagtcgtgattgacatgagctctattgacccggttgaatcaaaaaagatcggcgcagagctggctgaaaagggcattgagcttatggacgctccggtttccggaggagagccgaaggcgattgacggaacactttctgttatgtgcggcggtaaaaaagaaacctttgacaaatattatgatcttcttatgagtatggcaggatctgttgtatatgtaggtgatcttggttcaggaaacgttgcaaagctggcaaaccaggtaattgttgcaattaatattgcagcagtttcagaagcgctgactcttgcaaaaaaagcaggcacagatccggagcttgtatatcaggcgatccgcggaggtcttgcaggctctacggttcttgacgcaaaagcgccgatgatgatggagcataactttaaaccgggattccgtattgagcttcacattaaagacctgaataatgctctgaatgcatctcatgcagtaaacgcatctcttcctctgacttctcagcttatggagatcatgcagtcactgaaagctgacggatgcgagatggacgaccatagtgcaattgtaaaatactatgaaaaaatatctaaggtttcagtagaaaaagaaaaataatttatcgcttttaggcgaaggaggtaccaaaaatgggatttgtgccaagaggtattattcccccgattatcactcctcttactgacgagggtgaagtcaactatcctgttctgagacagatggtaaatcatctgatagataatggagtgcacggtttgtttccgcttggaacaaccggcgagttttatgcgtttgacgatgacacataccgtaagatactggaaacagtaaaggacgaaacaagaggacgtgttccggtatatggcggagcaaaccatattacaacaagaggcgtaatccgccttgtaaaaatctgtgaagaggttggagtagatgcagtctctgttctgacaccgatgtttgtatctcagacacaggaagagctttatgattattttgcagagatagcagccagtacaaagcttccgatcattctttataataatgctccgaagacaaatgttacgatcgccccgggaactgtagcaaggctggcagaaatcgacaacattattgcggtcaaagacagtacaggagatatgaccaatactgcagagtatatccgtctgacgcgtgataatgataatttccatgtactgatgggaagagatactctgattcatgctgcgctctgctatggagcatcaggcgccattgcatcctgtgccaatgtagctccccgtatcactgccgatatttatgataagtatatggcgggagatctgaaaggctctctggatgcccaatttactttagcgcctctgcgtattgcctgcagtatgggaacatttccggccgttattaaggaaggtcttgtacaggagggaattccggtaggaaaatgtctttcaccgattgcagagcttaaaccggaggagaaagaaaagctccatcaggttcttgcagaaatgaaactggtataaaggttcagaaagagttctgagcctgtaaataaaaaatgctgccttatgtatccggcgatacccccagatataaatccaccggatatgtgaggacagcattttttgtataaacaggtgaggcaaaaagctttataaatacagatatgtggatataaaacagcaaaaaaaggaggactgtggataagtatgagaattttttacgaggatatgaaaagggaatttgaaagggtccttctgaaaaaaggattcagtcaggaaagagcggagacttcggcaaaaatgtttgcagatacgtctcttgacggtgtttactctcacgggtatcagagatttccccgtgtgatagaatatattgacaagggatatattcatgtaaatgcgataccggaaaagcttgcgggagtcggcgcggcagaacgctgggacggacatctcggaatgggaaatctgaatgcagcgtctgctatgaaaagagctatggagctggccggagagtttggaattggccttgtggcaatgtgtaatacgaatcactggatgagaggaggcacttacggatggcaggcagcagagtccggatatattggaatatgctggacaaacaccatgccaaatatgcctgcctggggagccgttgacagtaagatcgggaataatccttttgtgatggcagttcccgggccccagggaaaacatgtggtggttgatatggctatggctcagtattcttatgggaagctggctgtatgccgacaggctcagacagatcttccttatccgggcggatatgatgaagccggagttctgacctgtgatccggcagctattgaaaagacaaggcgcgtccttcctatcggatattggaaaggatccggaatgtcaatccttttggatcttgcaggtgccgctctcacccttgggagaacagtatctaaaatcgggaaagagtgtaaagaagaatatgggctgacgcaggtatttattgcagtgaagccggagcttcttagcggggatgcggaggcagccaaagcacttgcagaggaaaccctgaaagacattcagaactctgtgccggaacatgcaaataaaaaaatccgttatccgggagaggggactctgattcgcaggaaagagaatacagagctgggcattccggttgatcctgagatatggaaaaaaatctgtgaattataaaaactacctgcctgataatttcagagccatatacaatacaactgcatcctgaaagctgcggggattgtagccgcagcggtgataaatctgattcagtctgtactgaagtgtgtttttgtgaagaaaagctttttcgcaggtgtccttcagtgacatattacatttaaaataagtgttcagaaggttcagatctttgtccgaaaggctgctgacagtctttgaaagataggcggagcggattctggccggcgcagaggaaagaatcagttccagggtcaggtcgctgaattctgcaaaggttctgccggaagtcaggagactttgcagaaccgtttcagattcgtcataagaatcgctgatctgacgaatgggcacagcatttccaacagcaatttgtacaggaagacctgagctttccggaaaagcttttaggatatgtctgctgttttcaaaaacagaatgttccagtactgccagatactgatcaggatacataaatgtataaagagtgatcccaagtttctgaaaaagctgatgtatcaccggttccggaagaagaaaagctgtatcgttatgagaggctgcatgggaaccggaaagcgtattttcgtgatcaatataaatacggattaaatgataccggctgttttcctgtattccccaacgggaaaaattttctgccagataatccggatgaatatccttatgctcgatcaaaccctggagaatatggtttttcttttcggcttctgtgcgatgaaaagcatccagttctttctcgcggatcagaagtctggtaatacgttctgcaagatgagcatattttcggatctcatccggatttccggtaattccgatgacagcaattaccttatgattatgataaacaggaagattgactccctgttgggttccggtaaatctgtcagtttctgttacttcgattactttgccgctgactgccgcctgtctgccgatttcgtgaaaatttccgatccgttcttcatttgtgctcgcaaagataatacccgaacagtctataaaatttacattctgcccgcagagatcactgacagtatttacaatctgacaggcaagcgacttgctgatatatggattcatgctttcctcctgaaataatactgtaaaaggtattgggtatatggcctattataccagagcggaaagcggttgtcgaacgggcagaattatttaaaaaagcctaaaataaggatatgtttcagtcagaagctgtcctttttcatccgggagactttttacagaaggcggaatacctgctcggcgcaggagcgcatattgtattttgctgtttctgtatccatggcttcttccagagtggtgattcctcttactattggaaagaaagcgtcaatctctgcctggttgcaggctgcggcatcttttgtaacactgcctgcaaaagcaattgtttttgctccatatttctttcccagctttgcaacccctacaggagcctttcccatagcagtctgatggtcaaggcggccctctccggtaaccacaatatctgcatctttcatttcatcttccagatgaactgcattcagaatcagttggattccgggagtaagctggccattcagataacttaaaaaggcaaagccaagtccgccggctgcgcctgcgccctctgccggggaatgatcttttccggtcagagaggcagtaacctctgcataatttttcatgccggcgtcaagaaccggagccatttcttctgtaactcctttttgggggccatagatataggtagcgccctggggcccgcaaaggggatttgtcacatcgcaggcgatctgaaaacagcattgggcaaggagctcttgtttgtcagaactccttacagaggagatttttgcaagagcctgtccgccttcgcctacgtcatttccgtctctatccagaaatgtaaagcccagggcttttaacattccgattcctccgtcgtttgtggcgctgcctccgatcccgataataaagttgcggataccattgtctatggcgtgaagaatcatttctccaactccaaaggtggttgctttcatgggatcagcgtgatctgaaattgtgattcccgcagcagaggccatttccataactgcagtgtttgtatcttccagatagccgtagtaagcgtctacaggctctcccatgggccctgtaactgtcagattgattcgttttccgtttaagccctccgtcagggcatcggtagttccttctccgccgtctgccagaggtctgactattacctccgcatcagggtgggcagccagaataccggactttactgcagtaccggcttccatagatgtcatacttcccttaaaagaatcaactgcaacaacaactttcatattaaaaaccctcctgtaagtatacttgaaatttatatttgtattttaccacgggaaaaatcagaggcatatgttgtacaggacaaaatatctgtgatttttaaggattttttggtacagataccaaggaagagggtaatacacttaatggcaatttaatcaaggaagaaagctttaaagcgattggtcggtttttaagtaagaattgtacgaccatctccgaagaagtgaaaaatcacatctgctttgaaaacagtggggcatatggcagagctttcaatgtttgacgcctggattttctacattggtgctctgcacaaatggtttgtcgtgaatgttccttccgcaaagagtgattctgtgtcaaatgttccttttcctgcctttttatgaaaaatatatttgccccagactctctaaaccgccttatgtctgcaacggctgtccggaacgcaataaatgttctccggaaaagcatctctatcaagatgcttatgtcaaaaaagggtatgagatggtcagaaagagcataagccggattttttgtgatgatctgcagacagagaaggtaaagaatatcttgtatggagaaaacggataggaactggagatgataaggaactttgagaacaggatgggaaatcccaaaatccataatagatgcgataggggcagtttgtgcgtattcttccgtatggaaagagaaaagtcggaaagcagcagaaaaaagaagggttttataaatatgcagagttaaaagcgaaacccctgagtaaaataagtttttgttttctttttgaaggcagtatgataaaattataaaaataatatctactgtgaaaaattataaaattggagaagggcaacggtacttaaagatatgatatggtagaatcaaggggaaggatatgtatgaaaaagaatagaatagattgggtggattgtgcaaaaggaattactttgttgcttgttattataggacatacagtaagtaccgatgcttcaaatatggtaagagcaggaatattttcttttcacatgacgctgttttttgtagtaagctgcgttacaggaaaactttcaaatagtaacgatgaatttgtgaaaaaaacagaaaaaggttttaaacatttaattcttccggcattgtttatatatattacagttttaatttatgttagttctaagtgcatttcagaatttcgttcctgggaatttgtgagaaaatttctaaaagaaagtttattgacaatggttttttcatccggagttaacttacatgtattatcagcggaaattaaaggtttgggtattccatggtttttagtagttatgtttttgggaaaaacattgtttgactatatgcatttaaaattatcagaaagaaaactgattgtaggttgtttactcctttcagtaacaggagtggcaatcagtcgattacaatggttaccattgtcttttgatattgtactaacaattatgccaatgttttatattggatatattttgaggaagttttgggtagaacataagccggtattgaaactattgatatttggaactggttggtttgtaacattttatttatgttataaaataaacgagggatgtaatggatatccctatatggtttatgccagcagacaatacccatcatatccgttttgctttttgcccgccattttaggaacattaatgattgcagagcttagtgtaatactttgtaagcaaaaaaagataatcagtcctttgctgtattttgggaaaaattctctttatatgcttgtgatacatgggattgacagtacatggatgaaaagaatctggcttatatcagaaaatatatacataaatataatatgcagaatcattgtggatatagtagtatttgcagcagtaatgtatgtgcgtggattatggaataaaagcaagcagcagagaatagaaagtatgcctgaaacctgataagtatgattgtatattatgttctgaaaataacaacacttaaaggaaaatcaaagactgagaaaaggagcctgatatctggggttctgactttggcacaacataaaggagttcagacttgaaaagcttacaggaagatttaaaaacaggaaattttaaacaggcgtatcttttgtttggggaggaggcctatctcagacaacagtataaggataagctgatacaggcattgaatccggatggagataccatgaattttaccagatatgaaggaaagggaatagaagttcgtgaaatgatcgatctttgtgaaacgatgcccttttttgcagagatcagggtgatccttgtggaaaactccggattttttaagaataagtgtgaagaacttgcggattatatgaaatcattgccggattatatccggatggtttttgtggaagaggaagtggacaagcgaagccggatgtataaagcagtgaaagcctgtggccgtatcacggaatttgccagacaggatgaaaaatctctgatgcgctgggcggcaggaatcctgggacgggaaggcaggaagatcagaacttcagatatggagctttttcttacaaaaacaggaactgatatgggaaatatccgtatggagctggaaaagctgatcacttacacccaggggagagatattgttactgctgaggatattgaggcagtgtgcaccacccagactgcaaacaagatttttgacatggtgcgtgcggtaacggaaagaaatcagaaacgggcattggaactgtattatgatcttctgaccttgaaggagccgccaatgagaattctgtttcttttggcaaaacagtttcaccagctttttctggcaaagaagatgtcagaggaaggcgtggcgcagccggaaattgcttcccggttaggagtaccgtcttttgtggcacgaaatatttccgcctgtgcccgttcctactcggctgcggagcttcagaaagcagaggaagactttgtggaggcagaggaagcagtgaaaacaggacggcttcaggatgtgctgagtgtggagcttctgatcgtaaaatacagttctgcacggtaagtcggagatttttaagagtcagccgtaaccgtcaattttgctgccttggtacaatacagaggaagaaaatatagtgaaggagactatagtttcagtaaaatgcagaggaactgttacagggagatgttcgggatatcaagaatatctgtttttttgcatgagcggaattatgaaataaacaagccgggattttccggcttgttttatgtgctttacaggtgtcttgacacctatcaagtttggtggtatacttgcaaaaaatgttaagaacagtcaaagattatgtaaagaaaaccgctcagatgtcggaaaatgacagctatgcggtgcgagggagaaaatgaaagaatattatgacgtgatcattgtgggaactggcgcagcaggtctttactgtgccctgaaccttccggaaagaaagaatatcctgatgatcacaaaaaaggaagcggatcagtctgattcttttctggctcagggcggcatctgtatgcttcgtggtgaggatgactatgaggattattttgaggataccatgcgggccggacattatgaaaataataaaaaggcagtagatctgatgcttagaagttccaacagtattatccgggatcttctgacgagagaggttgattttgagagaaatgaaaaaggagatctggaatttaccagagaaggagctcactctcagccgaggatcctttttcatgaggacattacaggcaaggagatcacttcaaagcttttggctcaggcacaggccagagaaaatattgaaattgttgaatacatgacaatggtagatctgatttcagcagataatatctgcggcggagttgttgccatggacgaacaggacgaaatttatgagatacgcgctccttacgtggtgcttgcctgcggaggacttgggggcctgtataaaaattctaccaattttccgcatattacaggagatgctctgggaattgccatgaagcatgggattctgctggaaaatattgattacatacagatccatcccacaactctgtattcaaagaagcccggaagacgtttcctgatttcagaatcagtgagaggcgagggagcttacctttatgacaaaaacggacagcgttttacaaatgagcttcagccaagagatctgctgagccaggcaattttttctcagatggaaaagcaggatacagaatttgtctgggaggatatgagacctctgggagagagtactattatgaagcattttccgaatattttcagcagatgtctggaggaaggctttgatgtaagaaaagaaccgattcctgtagttcctgcccagcattattttatgggggggatcaaagtaaatctgggaagcagaacctccatgcaggggctttacgcctgtggagagaccagctgcaatggtgttcacggtaagaaccgtcttgccagcaattcccttctggaatctcttgtatttgcaagaagggcagctgatgatatattatttgggaagaagccggagccatgccaggcaggcgcagtagaccggaaggcgtatgaggaccgggaaagtcttatggcaggctaccgtacagtgattttaaatgaaattgaaaggatgaaaaaaaatcatgaatgaaattacaatgaaaatgcaggcagatgagctgattatgatggctctgagagaggatattacaagcgaggacgtttccacaaatgccgttatgccaaaggcacagaagggaacggttgatctgatcgccaaggaggacggcgtgattgcaggacttcaggtttatgcaagagtatttacacttcttgatgacaaaacagaaattgaatttttctgccaggatggagaagaggtaaagaatggacagcttcttgccagagtaacaggagatatccgcgtgcttctttcaggagaacgtgtggctctcaactatcttcagagaatgagcggaattgccacctatacaagagaagtgacaaaacttcttgagggaagcagtctgactctgcttgatacaagaaagacaactcccaactgtcgtgtgtttgaaaaatatgcagtgcgtgtaggcgggggaaataatcacagatataatctttctgacggagttcttctgaaggacaatcatatcggtgcggcaggaagcgttgcaaaagctgtcgctatggcaaaagcatacgcgccttttgtccgtaaaattgaaattgaggtagagtctctggagcaggtaaaagaagctgttgaggcaggagccgatattattatgctggataatatgacttcggaacagatgaaagaggcagtagagttcattgacggaagagcggaaacagaatgttcgggaaatgttacaaaagaaaacattgccagaatccgtgaggtgggtgttgattatgtttccagcggtgctctcactcattctgcaccgattcttgatatttccatgaaaaatcttcatgcaatctgagaggagggaaagcatgaatacctctgagaggagaaaggagattctgaagactcttcagaactcggattttccggtggcagccagagagcttgcggcgaaattcggcgtgagccgtcaggtgatcgtgcaggatatggcggtgatacgtgcgtcaacaccgggaatcctttccactacaaagggctataccatacagcaggaaaacagctgtacaagagaatttaaggttcgccacagtcaggagcaggcagcgcaggaactgaacctgatcgtggactgcggcggacgtgtaaaaaatatcagcatcagccatcgggtatatggccgtgtttccgcagaaatggacatccgttccaggcatgatgtgacggaattcgtagaagctctgaacagcagccattccacagttctgagcaatgccacttccggttaccattatcatctggtagaagcagaaagccagcagcggctggatctgatcggccgtcagctggagaacgcaggattgctggcgcctctgcagccctgggaaaagaaagagaaaaaggagaacataagatgacagtagcggagttacaggcagaaatcattcgcctgaaaaaagaaaaaaacatctgtattctggcacatgcctatcagggacatgagatcctggaggtagcggattatacaggagattcctacggattaagtgtggaggctacaaaaagccactgcagcggtatgatcatgtgcggtgtccggtttatggctgagacctgcaagattctgaatcctgataaaagagtctggctggcaaatccggcagcaggctgtcctatggctgaacagcttgatgttcagggacttcgtcagttgaaaaagaaatatcccggttatgcagttgttgcctacataaataccacttcagagctgaaaacagagtgcgatgtatgtgtcacttccgcttctgcactggaaatctgcagaaagcttgacaatgataagatcctgtttattccagatccgaatcttggacattttgtggcagagcagcttccggaaaagacttttgctttttatgacggaggatgtccacgtcataagatgattacaggtcaggaggcagaaaatgcaaaagcggctcatccgaatgcccttcttcttgtacatccggagtgttgtcctgaggtgacccggcaggctgattatgtgggctctacaacgggaattatggcatatgcggaaaaatcggacgcagaagaatttattatcggaacagaaaacagtattgtagagcatctgcagttttcctgcccggataaaaagttttatcctctgtctgtttctcttacatgcatggacatgaaggttactacattaatggatgtttataattgcctgagaggaactgcaggagaagagatcgagctttctccggaagtaatggaaggcgcaggaagatgtatcagaaaaatggttgaataaacatatggagcaaggggaagcgcgaaagcgcttccttttgttgtcagtgggaaaacagataattttgatcagaaactgatatcatagcttacattattacagtgttatctgaggcgcaggcaacgggggaggagggattttaaaattttttaaacacataaaaccttgacttttatatcttacatatgtaatatttgtatataaagattacatatgtaggatttaaaaagaggtgattatgataaaaaagtcaaaaaagattttgtttacagttttgctgcttgcagtaggtatacttctgattgtttttgcagcaggtctggcattccggatgaagacagaaaagccggaagaaattttgagggcgtatttttccgcagtggaagaaaaggattatgaatctatgtatcaggtggtggatccggatacgttgatcaatcttgataaagagggttttatccagagaaattccagaatttatgagggaatggaagcccataatatccgtattgaaaacattcaggaaatcagcagcaggggaaagactactgtgctgtcctatgatatttctatggatactgcggccggaaccattgctttttctgatgagacaggctttgtcaggacaaaaaacagatatttacttttatggaatgacgggatgattcttcctgatctgactccatcagacaaggtaagtgttgttacagataaggcacagcggggaaggattcttgaccggaacggaaagacacttgccggtcccggaattgcttcttctgtgggcattgtcccgggaaagcttcagaataaggaggaagctgtaaaggaactggctctgcttcttgatatgagggaggaaaccattcttcagaagttaagcgcatcctgggtaaaggaagattcctttgtgccgctggcaactattccaaaagtcagtgaactggagcttatggcagaaaatcccggtcaggagcttcttcaggagcagcagcgtcaggaacagcttcttgccgtcccgggagttatgctgacagatcaggagatccggacgtatcctctgggtgaagccgcctctcatttgatcgggtatgtgcagcctgtaaccgcagaggatctggaagagcataagggcgagggctatgatgctgccagtgtgattggaaaaagcggggcagagcttctctatgaaaaagaactgaaggggaaaaatggatgtgagatcagaattgtagatcaggctggaaacaccaggaaagtggcagccagtgttccaagagaagacggacagaacattcagcttaccattgacagcggcctgcagcagtccctttatgaaaaatttcaggaggatcccggctgttctgtggcagtaaatccttatacgggagaagttctggctcttgtaagcactccttcctatgataataatgattttattctgggactttcggatactcagtggaaggatttgaatgaggatataaaaaagccaatgtataaccgttttcgtcagatctggtgtccgggctctgtgttaaagcctgtgatcgcgggaatcggaatgaaaacaggcagtctggacccggaggaggattttggaaatgcaggactttcctggcagaaggattcctcctggggagattaccatgtaacgactcttcatgagtatgagccggttacactaaaaaatgccctgatctattctgataatatttattttgcaaaggcagctttgagaatcggggcagagacattggcggattctctggaacagcttggtttttgccagaagcttccttttgagatttctgtggcggaatcccattattcgaatactgataaaattgaaacagagatccagcttgcggacagcgggtacgggcagggtcagattcttgtgaatcctcttcatcttgcaagcatttatacggcgtttctcaatcagggaaatatgcttcgtccctatttgagataccgggaaaatccttctgcagaaacatggattacacagaccttttctccggagatcgtggataagcttatggaaggaatgactggggttgtgaacgatccttcggggaccggatatggagcctgcagacaggacgttcttcttgcgggaaaaacaggaaccgcagagcttaaggcaacccaggaagattctacaggtacagaaatcggatggtttgctgtttttcctgtggaaaaggatgcttccagaccagttcttttgatatccatggtggaaaacgtaaaggaactgggaggaagcggatatgtagtccaaaaggatgcggaagttttagaggaatattttggaggataatacagaacgggtgattgcagcggcctgcgagccgtctgcatggtctgcaccctggatatttgcagcaaaatacagaacattatcatctgtttccacaaaacctacaaaccatccactgatatccctgccgtttctccgaatagttccggttttgccgtacagcgttctgcctgagaactctcctacccgaagcgcatcctttactgcctgaatgttttgttcggagcagtcaaaggtattcgtataaaaattctgaagaagctccacctgttctactgcggaaatcttcagtgagtcgtcagcccagtaaagcttcagatctttacttatctgcttgtttccataattgatttttttcagaaaggaggagatttctgttcttccaagcagctgatctatgttctgaaaataccagtttacagagtccttcatggcagaatcaagggtctggtcctgttcccaccggggaaatgcgcagggagtgccgtcccatttcatggaggaggattccggtgagataatgcccttttccagcccgtgaagagcagaataaattttgaaggtagaggccggagaaaaacgttggactgcaagctccggccggtaaattttccaaagcccggtctgactgtcatacagaacaaagcttccgtcaaaaccatggaaatctgtgaaaagctcaagattctctgtggtttttccatgtaaagaaacagtttcttcggagccagcgtatgcagacaatacaggtatcattcctgcaataagaacagaaatgagaagataggaaattacgcttttccatttttgtttcctgtttctgtgccggaaagaggtgattcccaggattcgccggcggagctggctgcctttgcttaccattccggaagcagacggataagaagagagcttttccgccagatttaaaagcgaagctccgtaaagagggtaatcctctgctgatagatgagccagcacagaggcatcgcaggcaagttcccgctccagggggatttttttcagtaccaggataactgccgggttaaaccagtaaataatgcggaacataatacaaagattattgacaagcccgtccagacggcggcagtgctgaagctcatggagaaacatataccgtaattcatgggtctgaaggacagagtcaagatcggcaggaataaaaatccggggtttcagaaagccggttgttacaggcgaatggattttggggctgacaaaaaccaaaatcttacgacgaatatggagctctgtacagcagtctgaaaaaaatttttggatttccggtttctcaaggagactggcgccgcattttattttatggaacttccatgtaatatggaaaaataaaagcagggttatggcagcaccggtaatccagaacgaaagaagtataagattccagtgtccgggagctgcagaatttacagagactgcaaaatcccggattacggagctggaatccgaggctgtcatagaggaaatgccagggaggttttgcgcggaagccggctgcaggctgtttataaaagcagaaagccattggaataatgagcttcgggatacgggaaacgaaaatccgaaaaaggatagtgggagaaaaggcacggacagaaggataaaatacggtatgcagagataataccggagccccggagaaagctggtttttcaaaagtctttttgcacagaccagtattcctgtaagagctataagaataagattgcagatcagaaagcggataccaaaattctgcaaattaatttcccccttccggaaaacgatcgttcaaaagctgacgaagagattccagttcttccccggaaactggttccgtgtccagaaaagaggagaacatggcagaaagctttccattataataccggtccagaaaactggaatttttctggcggaggtaatcctcttcagaaaaaacaggagagtagacaaacatccggctgcgtttttcataggaaagaacaccctttgtcacaagccgcttcagcatggtctggacagtttttgggctccagtccgtagtccggcaaagtatgtcagttacctggttggtactgatgggggcatgtttccagatgattttcattacctcgtattctgcttcagaaatctggggaagtttcatgacagtctcctttcgggatggatagaatggaatcttacgtatgtaagattattatagcccgggcgagggcgggtgtcaaatacataaaaaaagacagtcacatgacggttgtgactgtcttttttaattataagcttataattaaaaataaaaggcgtttttattagccgatgttgtttacggcttttgttaaacgggaaacttttcttgcacagttgtttttgtggtaaacacccttggatgtagctttgctgattgtagcaattgcctcgttaagtgcaacctgtgcagcagccttgtcgttattctgaactgcagcttctacctttttgatggaagttttaacagcagaacggatagacttatttctcgcagctttagttctgtttactaagattcttttctttgcagatttaatgttagccaatgtggacacctccatttcgagtttttttgattgattgctacaggaacagacacgggcgctcctgtaaacatgcttatttattttagtatacatattctggaatgtcaatacataattctcataaaaatgtaaatcttatagaaaaggagctatcaactgctttatgcgcagtataacactggaatttatttcagatgtcccgggaaaatgagcgcattaattgtatgaaatcggacaggattgcatgtatagcagggaaaagacactggcaatatcatttacaggcatggagggaaaaatgtcaggaagcagcagaatcagaaccgacctggctcttgaagcaacggagagctttgcacaaagcaatacagagcttcggggagtagaagtaaaggaacaatatgatgaagaaagagacatccgcactacggttgttaaaataacaacagaaaacggggcaaaggctatgggaaggcctcagggaaattatattaccatagaagcgccaaatctttcggcctcggacgaggattatcacagagaaatttcagaagagatcgcccgtcatctgagaaagcttgtcaatctgaagcgagagacatcagttcttgtggtaggcctgggaaatcaggcaattacagcagatgccctgggtcctcatgtggtggataatctcagaatgacccgccatattatcagagaatacggacttaaaagcacagaaaaggaaattctgcaccgggtcagtggtcttgcgccgggcgttatggctcagacaggaatggaaacttcagaaattgtaatgggtgtagtggcagaaacaaagccggatcttgtgattgcggtagatgccctggcagcccgcagtatccgaaggctgaaccggacagtccagatcacggatacggggattcatccaggttccggggtgggaaatcacaggatcggacttactgaagaatatcttcaggtaaaagtaattggaatcggggttcccacagtagtagatgcggcaacgattgtccatgattctatggaacatcttctggatgcactggaggaacaggagcagaaagagttcctggaggaaatgattgcgccaaatctttacagtatgtttgtgacaccgaaggatgtggatgaaactgtaaaatatttaagctttaccatatcagaggggctgaatatggctttttcaggcgtctgatgggaaaatcaaaaaatagatttctgcatagataaagcttattgctgctgtcgcagagaatcagaatatatgaccgggaaatactttgacagcagcatatttccggaaatacaggggtataatcatatcatttttgtcataggattctttgaaagaggtgattctatgacgaagctccagaaagtaacctgcattattttgagcgttttcttttttgcggttctgcttttggttccgggaccgttttttttgcggggaaatgtgtacaggcagctgccgctttactgctttctggaggaagaagcaacaagtgttcctcagagagaagatccggaaacctatgaaaaacttgtggaaagtaatgcaaaatatctggctgatatgatgaaggcggaaaatcttcagtcgggcagtgatgatatgcgggaaaatcaggaaacggctgctgaaaaagaaaaaaacagaccggaagcacacctgtcagaaaatgaaaaaccggaagaaaaaacagaagaatcggacaggcacttgcaggaacagcaggtgaccggagaaaagaaaagctctgagacagaggcgattcccacatcaaaaccggaagtcagcccggtatcagatcccactgccagtccggcagtcagttcagcagcctctgcacagcctgccctggcgcagatacagcctgctccggttattgatctggcacctgaaatgctggcagactataattatctgctggataatttttttattgtggacgaagacactgccaccagcgcagagcagctgaatgccgcagaatttctggcaaacgatcttactgtaaagagggattcacaggtgccgcagattcttatttatcacagccacactcaggagacctttgctgattccagagaaggtgtggtggaggattcaattgtgggagtagggaattatctggcggaaatccttacagaaacctatgggtatcaggttcttcatgtaacagaggaatttgatctggcaggcggcgtgctggacaggaataaagcctatgactatgcccgaccttatatagagcagatcttgaaagaaaatccttctatagaagtggtgatagatcttcacagggacggggtggctgaggatcgtcggctggtaacagagatcaacggcaaacctacagctcagattatgttttttaacggactcagttatacagcctcaggcggaccggtggattacctgcccaatccatacatacaggataatcttgctttttcttttcagatggaataccaggccgcgcagtattatccggatttttacagaggaatctatctgtccggactgagatataatctgcatctgagaaaaagagcagttcttctggaagcgggggcgcagacaaatacagtgcaggaggtaaaaaatgcaatggaaccttttgcagatattctgaacagagtcctgacaggggagtgaaaaatcttgcttacattatacagaatgaaaactcttaaaggcaatagaggatatatgcaggagcagcttctgtttatttatattataaggatttatgcgttatatggaactgtaaatgagacaatacagaattttgcacaataaaatccacagtatgcggacataaacaaattttaaactttatttgtatatcctgtaaaggcaaaacagagaagattttgtgtgcttttttaatctgttcatttacagagatggtatttacttttgccggctgggatttaaaaatgcatttaagttttgtcgaaggaaaaaagaaaataggtcttgaaaatatgaacgtatgtttgtataatgaaagcaggaaaataaatagcatgtatgactgcgaaaggccttggaaagcagggctgataactggacttgatgagggcggatatgctataatggggcacgatataacgaaaatacactgagataagaggaggaacgctgcggaatgacagatcagagcaagattcgtaatttctgcattattgcacatatagaccatggcaagtccacacttgccgaccgtattattgagaagaccggacttctgacacagagagaaatgcaggcgcagatcctggacaatatggatctggaaagagaaagagggattactattaaatctcaggcagtccggattgtttataaagcaaaggacggagaagaatatatttttaacctgatcgatacgccgggacatgtggattttaactatgaggtttccagaagccttgcggcctgtgacggagccatccttgtggtagatgctgctcagggaattgaagctcagacactggcaaatgtctatctggctcttgaacataatctggatgtgcttccggtgatcaataagatcgatcttccaagcgcggaaccggaccgcgtgatcagtgagatcgaggatgtgatcggactggaggcagaggacgcgccaaggatctctgcaaaaacaggactgaatattgaggatgtactggaacagatcgtggagaaaatcccggcgccggaagggaatccggatgctccgttaaaagccctgatctttgattctatttatgactcctataaaggtgttattgtattctgcaggctgatggacggatgtatcagaaaaggcacagaagtaaaaatgatggcaacaggtttttcaacagaggttgtggaggttggatattttggagccggccgttttattccatgtgatgagctgtctgctggaatggtaggttactttacagcaagcatcaaaaacgtcagtgatacccgcgtaggcgatacggttacagaagtgaccagaccgtgtgcggaggcgcttcccggatataagaaggttcagcctatggtttactgcggcctttatccggcagacggagccaagtacggggatctgagagacgctctggaaaagcttcagttaaacgatgcgtctcttttctacgagccggagacttctgtggcgctgggcttcggttttcgctgtggatttctggggctgcttcatctggagatcattcaggagagactggagagagaatataaccttgatcttgtcactaccgctccaggcgttatttataaggtctataaaacaaacggagaggtaatcgaacttaccaatccgtccaatcttccggatccctcagaaattgagtatatggaagagcctatggtaaatgctgagatcatggtaacgacggaatttatcggcgcgatcatggatctttgtcaggaacgccggggacagtatattggcatggattatatggaggaaacccgtgcgcttctgaaatataagctgcctctgaatgagatcatttatgacttctttgacgctctgaaatccagatccagaggatatgcatctcttgattatgatctctgcggttatgagcgcagcgagcttgtgaagctggatattcttgtaaataaggaagaggtagacgccctttcctttattgttcatgcggaaactgcctatgaaagaggacgtaaaatgtgcgagaagctgaaagaggaaattcccagacagctttttgaaattccaatccaggcagcaatcggaagcaagatcattgccagagagacagttaaggccatgcgtaaagacgtgcttgccaaatgttatggcggcgatatcagccgtaagaaaaagcttctggaaaaacagaaagagggaaagaagcgcatgcgtcaggtaggaaatgtggaaattcctcagaaagcctttatgagtgtcctgaagctggatgagaaataaggaattctgtgaaggtcagaaacagtactaataggtgactgtacgcagaaggctgtaaaggtcaggaacagtaaggaaaatagcctgaacaggcctgagcctgtcagaattggagataggaaatgaaaaaaaatgcagcaagaaagctggttgttgtttctgtgcttctgctctgtgtgtttatggcaggatgcggctgcggcaaaaagaaaaaggatccggccacccagcaggttctgaagatcagtatcacacctgagccgtcgcctgcgcctgaaccggataaaatggatcagaaggcagtagtcaaaaacggaaatattaccatggtaaatgaatatctggtcaacgggaacaagacagacgataaagaaaccgacagcagaacaggtgagaactccgaaaatgcagaaagtccggaaccggaaaccgataacggcagcgatacaggagatcaggaggacattattgaagaataaagggaaaaaacctctggaactttatcttcacattcctttttgtgtgaagaaatgtgattactgtgatttcctttccggtccgtccggcacagagaccaggaaagcatatacagaggctcttattagagaaattcaggcgcttccggaacacctggacagagaagttgtttctgtgtttacaggaggaggaacgccgtctcttctggatgcttcggacatggaacggatcatggcggctctccgagacagatttgaattttctgagaatgcagagatcaccatagaggccaatcccggtactctttcttctgataagttggaaatatatcgggcggccggtatcaaccgtctcagtctgggacttcagtcagcggataacagggagcttcagattcttggaaggattcatacgtatgaagaatttctggaaagctatgagctggcaagagctgccggatttgacaatattaatattgatctgatgtcagcaattccggaacagacctgtgaaaaatggatacataatctgaaaactgcagcagaactgaagccggagcatatatccgcctacagcctgatcgtggaagatgggacgccttttgcccggagagaactgaagcttcccggtgaggatgaggaatatcagatgtatgaagatacggcagatattttgaagagatatggatttgaacagtatgaaatatctaattatgcaaagaatggatatgagtgcagacataatataggttactggaaaagaacagagtatcttggacttggactgggatcagcctctcttgtagatgaagaactatggaaatgcctttgtggagaggaaaccagcggaagctctgaaagagaaggtatggacggaacagaatactgcagcccggaacagagggaataccggttctgtaatacccggaatctgcaggaatatctggagagcagcaggaatccccggataatccgccgggatgttgctgctttgtcagaaaaggaacagcaggaagagtttatgtttcttggacttcggatgacaaaaggcatttctgttcaggagtttaggggacgtttcggaaaagaaattgaagaaatttacggaaaagttctgaaaaaatatgaagccatgggatttctggaagaaaacggtggattctggcgttttacgcgaaagggaatacatgtaagcaatcacattctgtcagattttcttcaggactgaagggctgaaaccaaaagcaggatacagaatccaggtatatacaggatagaaattggaggaacaaatggctgaacatacaacaggcaaaaagtttatcagaatccgcggggcaaatgtaaataatctgaaaaacctcagcgtggatattccgagagatgaatttgtggttctgacaggcgtcagtggatccggaaaatcttctctggcttttgataccatttatgcagaaggacagagacgttacatggaatctctttcttcctatgcaagacagtttctgggacagatggaaaaaccggatgtggaaatgattgaagggcttcctccggcaatttccattgaccagaaatccaccaaccgaaatccccgttccacagtgggaaccgtgacggaaatttatgactatcttcgtcttctgtatgcaagaataggaattcctcattgtcccaagtgcggaaaagagataaaaaaacagaccgtggatcagatggtggatcatatcatgtctctgcctgagcggacaaagcttcagcttctggctcctgtggtcagagggcggaagggaacccatgtcaagcttctggaacaggcaaaaagaagcggatttgtccgtgttcagattgacggaagcctgtatgaactgtcagaagagattaagctggacaaaaatatcaaacataatattgaaattatcgtagaccgtcttgtggtaaaaccgggaatcgaaaaaagactggcagattccattgaaactgttctggatcttgcagagggacttctcatggtagataccatggacggaaatgttctgaccttcagccagagcttttcctgccctgactgtcagatcagcattgatgagatcgagccaagaagtttctcttttaacaatccttttggagcctgtccggattgttacggccttggatacaaaatggaatttgatgaggatctgatgattccggataaatcactgagcatttcacagggagctatcgctgtaatgggatggcagtcctgtacggataagggaagctttacaagagccattctggatgctcttgcaaaggaatataatttcagtctggatacaccttttcaggattatccccagaaaataaaagatgtgctgatccatggaacagaaggcaggtctgtcaaggtttattataagggtcagagaggagaaggcgtttatgatgtggcgtttccgggactgatcaaaaatgtggagcagagataccgggagaccggttccgatgccatgaagcaggaatatgaaacttttatgcgcatcaccccatgcaaaacctgtaagggacagcgtttgaaaaaagaagctctggctgttactgttggcaataagaatatttatgagctgacagctctttccatagagaatctgaagaagtttctggctgaactgaagctgacagaacagcaggaactgatcggaaggcagattctgaaggaggtccgggcaagagtgggattcctggcagaggtaggacttgactacctttctctgggacgggctacagcaactctttccggaggggaagcgcagagaatccgtctggcaacgcagatcggttccggtcttgtaggcgtggcctatattctggatgagccaagtatcggacttcatcagagagataacgacaagcttctgaaagcgctgatgcgtctgagagatctgggaaacagtctgattgtggtagagcacgatgaggataccatgcgggctgcagactgtgttgtggatattggtcccggagccggggaacatggtggaaaacttgtggcaatgggaactgcagaagatctgatgaaaaatgaaaattccataacaggtgcttatttaagcggaaaatgcagaatcccgataccggaagagcggaagaagccaacgggatggctgaagatcagaggagcttcggagaacaatctgaaacaggtaaatgtggatattcctcttgggattctgacctgtgtcaccggtgtcagcggatcgggaaaaagctctctgatcaacgaggtgctttataaaactctggcgagagacctgaacagagcccgtatcattccgggaaaacataaggaaatactgggactggaagagcttgacaaggtgatcagtattgaccagtcgccgataggaagaactcccagatccaatcccgcaacttatacaggtgtttttgatcagatccgggacctttttgcgtctacggcagacgccaaggcaagagggtataaaaagggacgcttcagctttaatgtaaagggcggaagatgtgaagcctgcagcggagacggaatcatcaagattgagatgcactttttatcagacgtttatgtgccctgtgaggtctgcaaaggcaaacgatacaatcgtgaaaccctggaagttaagtataaggacaaaaatatttatgatgtgctgaatatgacagtggaagaagcactgggattttttgaaaatatcccgtctatccgcaggaagatccagaccttatatgatgtgggactttcctatatccgtcttggtcagccctccacagagctttccggaggagaggcgcagagaatcaagctggcaacggaactcagcagaagaagcacaggaaaaaccatctatattctggacgagcctacaaccggtcttcatttcgcggatgtgcataaactggtagatattttgaaacgtctggcagacggtggaaatacagtagtagtgatcgagcataatcttgatgtgatcaaaacagcagattatattattgacatgggacctgagggcggcgatcggggcggcacagtgatcgcaaagggaacgcccgaagaaattgtaaaaataccggaatcctatacgggacagtacgtggccagatatctgaagcagtaaacagagaactgccggagaggtaaagaattctccggtacaaaattacgtcagtgacagagtttggtcagaaaggagggcattatgcctgcaagtgatatcggaatcgatctgggcaccagaaactgtctggtgtattctacggcaaagggacttgttcttcaggaaccttctgtagttgtttatgataaaaatacagaaaagatcagagccataggggaagaggcccgtcagatggcaggccatgtgacctctaatatggaagtgatccgccctatacgtcagggagtgatcgctgactttaatgttacagaaaaaatgttgaaatattttataacaaaggcaatgggaaacagggttttccgtaagccccggatcagtatctgcgttccaagcgggattacggagattgagagaaaagctgttgaggaagttacttatcaggccggggccagagaagtttttctggtagacgagccgatagccggagccataggctccggtgtggatgtaaccaagccttttggaaatctgatcgtagacataggcggaggaaccacggatgtggcagtgatctctctgggaggcgtggtggtttctgcatctgttaagatggcaggagatgcctttgaccaggcgatcatgaattatgtgcggaaaagtcacagcctttttatcggagaagatatggcagaggaaataaaaattaaaataggaacagcgattgaagagtccagccctcatgtcatggagataaaaggcagaaacataatgacaggacttccaaagactgttaagctgacctctgaagaagtgcgggctgccttaaaggacgctaccggacagattgtggaaaccgtgcatggggttcttgaaaaaactccgccggagctggcagcggatattgttgaccgcgggattgttctgacaggaggcggcgcgcttcttcggggaatggatacgctgatcgagaggaaaacaggagtcagcacactgaccgtgcagaatgcaatgagcgtagttgctgtaggaaccggaaaatatgctgaagtaagagcaagaatggaagagtaagatgagtgaaagcgtaacaggatatattgaccatattatattcagaaatgaagacaacggatatacggttcttgttctgaaaggaacagaaggcgacgatgaggagctgacctgtgtgggaacttttcctgtgatcagtcagggagccaccattgaggcttccggaaattttatcaatcatcatatttatggaaaacagtttcagatcacctcttttacagaaaaaatgcctgaggatgccatggcaatggagcgctaccttggctccggggctattaaggggatcggagcggctctggctgccaggatcgtccgcaggtttggggcagatactcttaggatcgtggaagaagagcccgagcgtctggctgagatcaagggaatcagtgaaaaaaaggcccgcgagatcgctgctcagatggaagaaaaggcagatatgcgaaaagcaatgatgtttttgcagaaatatgggatctccctgaatctgggggcaaaaatctatcagaaatacggagattctgtttacagtgttcttcaggaaaatccttaccgccttgcagatgacatcagtggcgtgggttttaaaatcgcggatgaaattgcagggcgcataggcattcatacagattcagattacaggatcaaaagcggaatgatgtatactcttttacaggcaacaggagaaggtcatgtgtatcttccgaaagaagagctgttccagagatcctctgagcttcttggagtggacgtttcctatatggaaaagcatcttatggatctttccatggagcgaaaggtgattcagaaagaagaaggggaaacggtactggtttatcccagtcgtttttattacctggagcttaataccgccagaatgttaagagagctgaatattgactgtcctgaggatgaagcttttgtgcagcgcaggattgcccagattgaaaaggaaacaggtacaacactggatgaaatgcagaaaaaagcagtgaccgaggctgccggccacggtctttttattttaaccggaggaccgggaaccggaaaaacgacaaccattaatgcaattatccgtttttttgaaggagaaggcagtgaactgcgtctggcagcgcctacaggaagggctgcaaagcggatgacagaggccacaggctatgaagctcagaccatacaccggcttttggaattaaacggaatgccggaagaggaaagacagggacaggcagttcattttgaacgaaatgcggaaaatcctcttgaagcagatgtgatcatcatagatgagatgtctatggttgatattcagctgatgcattcccttcttctggcagtaaccgcaggaacacggctgattcttgtaggagatgaaaaccagcttccaagtgtgggtccgggaaatgttttaagagacattatccgaagcggagaatttccggtggtagagctgaaaaagatcttccggcaggcttcagagagtgacattgttgtcaatgcccataagatcaaccggggagaacaggtgactctcagtaataaaagcagcgatttctttttcctgaagagacaggatgcagacattatcattcgagtggtgatcgccctgatccaggagaagcttcccagatatgttgaggcaaagccttttgatattcaggttctcacgcccatgcgaaaggggttgcttggtgtggaaaggctgaaccagatcctgcagcgttatctgaatcctccggaaccatccaaaaaagaaaaagaatatggtcagggtctgttccgggaaggcgacaaagtcatgcagatccggaacaactatcagcttgaatgggagatccgcggaaggtacgggattcctgtagataagggcgtgggtgtctttaacggtgacacggggatcctgaaaacgatcaatgaattttcggaaacagcggaagtggagttcgaggacggacgctgtgcggaatattcttttaagcagctggaagaactggagcttgcctatgcagtgaccatacataaatcccagggttctgagtatccggcagtggtgattcctcttctgtccggaccaaggatgcttttaaacagaaatctgctgtatacggctgtcacaagagcgcgccggtgcgtgaccattgtaggcagcgaagaaactttccgggaaatgataaaaaacgaaaagcagcagagacgctacagctctcttgatatcagattaaaagaggagctgtagatacctttttcatcggggagaaaggactgtttttgaataaatatgtaaatatgtttctcaatatcctttatcccaggcactgccctgtgtgtcacagaatactgaaaaatcagaaaacgctgatctgtccggagtgtgaaactgtattttgcaggatcggagaggattattgtctgaaatgcggaaagcctgtaaaaaagcaggaagaatactgcagggaatgctcggcgctttgccgcagctttgatcagggaagatctgtttttatttataatggaaagctcaggcagtcgcttgtgagatacaaatattatggctgcagggaatacggggattattatgcggatgcagtctgtaaatacacaggaaaagacattatgagatggaagccggatgtgatcgtaccagttccccttacaggccggaagcagcgtatgagaggttttaatcagtctgcatatctggctgacagagtgggagaacagcttcagatccctgtggcttatggactggtaaaaaagacccgcaatacaaaatcccagaaaaagctgaatgcagctcagagaaagcaaaatcttgcagatgctttccgcgcagaggaaaatatccggggacttaccgtactggtgattgatgatgtatatacaacaggaagtactgtggatgccatggctcagtgcctgaagggagccggcgccgaacaggtgtattttattacgctgtgcgcaggacagcagtagaaaaaccataaaaacacttttcatggataatgatatatgttacaattaaattactgtgaatatttgtgtccttttacagaaaatacaggagacggatatgtccgacggtttattcagaaacagattgcttattgaggagtagatcatgatcaacgaagaaaaggttaaaataatgaccaaaattgctatgtatgagcagggaaaaggcagaagataccttccggtcagcaagtattatagaagcgattacatcggactggctctgattaagaacttttttcttgttactatcgggtatgcgctggcaattgctgcagtagccgcatattttggggaatatctgatggaaaatattcataagatgaatcttgtttccatgggtatttacataattgtgggatatgctgttgttcttgtagtatattctgttcttacttatattcagtattctgtgcggtattacaaagctaaaaagagtgtgcgggagtattacagccagcttactgaactcagcaagatttatgtgcgcgaagagaaaaaagcagcaggcagaggaactgcaggagggtatcggaaatgacagctttactggaatttaaacagaaaataaaaggattatatgcaaaatatgaaatgtatctgcagccattgatgaagtttgttctggctctggtatatttcatatggatcaattccaatatgggatatatgacagctctggataatatgtttgtggtgctgatacttgcgctgatctgttctattctgccatccggaatgaccatatttgcaggttttgccatgatggtaggccacagctatgcgctgggaatcgatgttgcgggatttatgcttgtcctcattctttttatgatgatcgtatttctcagattcagtacagagcagaatattgttgtggtatttacacctcttgcctgtgcatttgaccttccggtacttctgcctgttggatgcggtcttttaagcagtgcgctttctgcacttccggcagcaggcggtgtgatcctctattattttgtaagatttcttggaagtcagtctcagatgctgcagaatccggatgccgagattctggacaggatcacgcttctttctgatggacttatgaaaaacggggagatgtggctgacgcttgttgcgtttgtggctgtgattctggttgtaaatctgatcagaacaagaatgtttgaccatgcatggcggactgctattgtagcaggcggagtaatctacgtagtgattatgctgatcggaagcatttttatggaaatttccatttccgtggtgccaatgatcatcttttcggttgtgtctgtcctcattggtcttgtccttgaattttttgtatacggaggagactatacacgtacagaaagacttgaatatgaggacgatgagtattattattatgtaaaagcagttcccaaggcacttgttgcaacttctgaacgcagcattaaaaagatcaatgccgagccgccaagggaagataaaaatcggaatgaacgtgtggtaaaatataatgaaccactgttccatggacaggaaccgcagaagcaggcagagaacagccgctttcatcgggaagaacagatgctcagaaagccctctgtggataacattgattttgaaaagaaactggaggaatccctgaaggatttataacagaaatatgattttgtaacctgaggaagcataagaaagagaggagcagttatgcagaacatcataagtgtattgaacagatatctgtcgcatatcaatatgccttctgtcaatatcattgatgtaatagaaattctgttgatttctgtatttgtatatcagtttatggtatggatcaagtatacccgtgcctatactcttttgaaaggacttctgattatcagcgcttttctgcttgtggcgtacatttttaagatgaatacgattctgtggatcgtgtccaagctttccagtgtgcttattatggcagtgatcgttattttccagccggagctgcgtaagattgtggagcagctgggccagaagaggatcatgtcagccattattccttttgatgtgggaaaggaagtaaaagagcgttttacagataagacgatcaatgagcttgtaaaagcctgctttgatatgggggaggttaagaccggggccctgatcgttattgaacagaaaaaccgcctggatgaatatatccgcacaggaatcaatgtggatgcagttctttccagtcagcttctaatcaatatatttgagcataatactcctcttcatgacggagcagttgttatgagagggaatcgtattgttgcagctacctgttacctgccgctgtcagataatatggagctgagcaagcagctgggaacccggcatcgggccggcgtgggaatcagcgaggtttctgattcggtgacaatcatagtctcagaggaaaccggtcagatttccgtggctcaggaaggaaagcttgagagaattgtttcatctgccaaactgagagaaattcttgaaaaagcgcagaataaaacaattgtggataataacaaactgagacagcttttaaaggggaggtcaaagaatgaaggaaaaactgacaaataatctttctctgaaaattctttctctgcttgttgctattctggtatggcttcttgctattaacatagacaacccgattgtgaaaaaaacttttattgtaacagatgttcagcttctgaatgaggcctacattgatgcagacggcaaaatgtgtatgcgaaacgaggaacaggagcccatccgtgtaacaataaaggctcagagaaaggttctggatgatctgacgtcagcggatatccgtgcagcggctgatctgcagcaggcggtgagtctggatacaaatcctgttatggtacccattactgccacagtggataatattgctccgggcaatatccaggtgacacctcagaatctcagtcttcatatagaggataaggaaactaaggagtttgttgttactgtgacaaccaaagatacaaagcctgaaagagggtatgaaattggaaatttagtatccagtcctgagaaaatcaggattacaggaccaacatctctgatcaataaaatagataaagtaacagcctctgttgatgtcagtggcgcatcttccgatgtgaccagagagacagatgttacagtcattgacaaaaacggcgagcagttcagcagccaggatatgtcatatcttaatgtgtcaaaggtttatgtgactgcccgtttatggaaagtgcgtacagatgtaaaaatcagcgcagaatgctccggaacgccggcagatggttatcaggtggaaagtgttaccactacgcctaatgtgattagtgtgtcgggaagcgatgaggcgttacatgctcttgctgagcagaataacacagtatggattccagcagaggctattgatatatccggcagggataaggactgtgaagaaaaaataaatatatctgattatcttccggagggactgaaactgaccagtgattccagtgaagatgtatttgttcatgtaaatattcttccggagggaagtactgtatgcgaggttcctacaaaaaatattaaagtggaaaacgtgccggatggaatgcaggtggcatttgatgcggcacaggtagaacttcgtgtaaagaaaacaaaagaggacctgggagatctgaaggaaaaaaatattaaagcctccattgatctgaaagataaaaaagaaggaacttacgaggtggttgttgatatcgagattcccgagggatatgaacttgtggatgaggtaaaaacacaaattgaggtttccaggatttccaaggcagaagaaaacagttaaacaggagaagggaatatggtcagtcagaaaattacaatcaataatccttctgggcttcatttgcggcctgcagggaatttgtgtaatgaggcgatcaagtatcagtcattgattacctttacgtacgaggggggaacagccaatgcaaagagtgtgctcagcgtattgggggcctgcgtaaaatgcggggatgaaattgagcttgtctgcaaaggggcagacgaggaggaggcaatgaaagctatggtcaaagctatcagcagcggccttggtgaataaataataacatgaggaatgaagaagaataagcaaggaggaagtacgttgaaaaaacgagtggtggcaattcttttgagcctgacaatgtgttcgtctatggtaacagaggccggtgcggcggcaatgctggattcggcagtggaatcatattctgaaaacagtttttcagattctgaatcagatgttactgtggaagaagagccaatggtggacggtgaaacagagacgccggaagatactgatggtggtaatatttcaattgaagatcctgagggagagatgcagcagccctctgacgaaccttctgacaatacagacagcaatgatgtgacagacaatacagaaccggaagtgggatttgcagatgatcttttcagttcaggtgacaatatgactgagtcggaacagaaaactcagactgtaccggaaatggaaaatacaactgcagagcctgcagcagcttttgagacagaggatgcagaaaagcatacagccactctgctttatacacgttggaagctggaagagggaaataagtggatgcttcagaagcttccaaagacaagggatactgtagttggtaacgaaaacgcagaagttttagacggaacagctgcagatgaaggtactgtatcggagatgcttccggatatacagacagaaagtcagtctgcttctgctgaaactgatgatgaaccggtgactacatcagaagaagttacagacacaacagaagcagtaaaccttgaaggtgatatgcagggagatacagaacagctggaaacaattccggaagttatccctgatgttaatactgttccggaaacagaagataatatatcgcaagagaatgtatctgttgatgtacaggatgcaaaagaatcagtggagtattacaggaacacactggttgaaattacaacagtagacagccggggacaggttcttcaaaaaggaacatactattttaacgaaaatgggtgtatgcttacaggaaaaagagttgtaaatcctggcacagagggatttccttacgattccccggctgagtacttctttcagtacagctccagtgccaaggtgacaaatcctgatacagaggcaggagatacaccgactccttttaattccaacatgggacagatgcagaagaatactggatacatgtgggatgcaggtgcttttcataaatacggagaggatggaagagcagaagaaattgcacctaatatgatatacaagattggtggtcagttttattatcttttggaagatggcaaaccatatattggtgtagtagaagcttcctataatggaagaaaaggactgtatgcattcagaaagagtgagccaggcgaaaaggttcctggaaaaatggtattcaatcgttgggcaagtatgaaaaccagcaagggagacaaatggcttttctttggatccaacggtcttaatcaaaaaaaaggagcaggtgtatataaattgcttgcgccttccaagaatacagaatatctgattgattcttacggatatcttgccaaagacaaagtgattaaagctgctaatggttcctactatatggcaaataaatatggctgggtatacaaagacagcgttgttaaatggaataatgccagatattattttggtaaagacggaaaacgtgtagaatggactaaacggtggattcgtgtacacggaaacaagaaaggacgttattattatatcggaagtattcccggtcgtattcaggaaatgaagggaatccagaatgttaccatgaatggtaaacatgttggatggtttttgtttgactcaaatggtgaaaatgttcagagccaatggtcaggtgacagatattttcttggtgatggacgtatggcaagcggacccgtgacggtaggtgattataagtacttttttgaacgcagttcatcaacgcagtgtcgtggaaaaaaatataagagccaatggatcaagtataataataagttttattatgcaacaaaagagggcagattatatggagccggatggaaaacaatcaatggtaatagatactattttgaagactggacagcagttaccaatgttgtaaagaaagatccggatacaaagctgtatggatatttggatagtcgcggaaagtttacaacagagtggattgcacataataactcaaaaaataatgcaagatatgtgaatccacagactggtgcagtatataaaaatatgaccaaaactattgacggggtgaactatcgttttgacaagtatggaaaccgtgtcaatgacagaacaagtgaattcaaacgcagtaactattatctggagtgtgatcgtgtaaatggagttatgactatttatacagacagcagtaaaaaaactccgattaaaacaatccgtgtatccgttggtcttccggaaactcctacaaaggttggaacatttaagattaccagagcggatcgctggcagctgcttatgggaccgtcctggggacagtatggatctcatgtagtaaatggaatttatattcattcagtagcaagcggtcagccgaacggaaataaccttccggcaggagaatatctgaaacttggaaacccggcttctcacggatgcatccgctgctgtgtggcagatgccaaatggatttgggaaaactgcaatggttctacaattcgtgtatttgacgggaagtacaaatcagatgaatgctttaagggacctctgggaagaaatccgctgacaccattaagaggaagcggaacctttgatcctacagatccaaactataactaatcaataaaaagggggctgttgcaaatcctgtggaaaataaggttctgcaatggcctcttatcaggaggagaaaatatatgagaacatatctggtaacaggaggagcaggttttataggttccaactacattcactatatgtttgagaagtatgacaatgaaatccgcattattaacgtagataaactgacttatgcgggaaatcttgaaaacctcaaggacattgaaaacagagacaactatacttttgtgaaagaggatatctgtgacagcgaagcgatcatgaagatctttgaggaaaatgatattgaccgtgttgttcattttgcagcagaaagccatgtagatagaagcatccgcaatccggaagtttttgtaaaaacgaatgtacttggaactcttgttatgctgaatgctgcaaaggctgcatgggagcttccggacggaacctttaagccggacaaaaaatttcttcatgtgtctaccgatgaggtttatggctctctggaagaagacggcggatatttttatgagacaacaccgtatgcgcctcacagcccgtattctgccagcaaggcatcttcagatatgctggtaaaatcttatatggacacctataagttccctgccaatattacaaactgcagcaacaactatggtccgtaccagtttccggaaaaactgattcctctgatcatcaacaatgcgctccagggcaaaaagcttccggtgtacggcgacggaaagaatgtaagagactggctttatgttatggatcatgcaaagggaatcgatatggttcaggaaaaaggccgcctttttgaaacctacaacatcggcggacataatgaaaaacagaatatccagatcattcacattattctggatactctgaaagagatgcttccggaaggagatcccagaagagagcttgtcagcgaaaacctgatcacttatgttgaggaccgcaagggccatgaccgccgttatgcgatcgctcctgacaagatcaaggaagaggttggctggtatccggaaacctgttttgaggatggaatccgcctcacgatcaaatggttttttgagaatgaggactggatgaaaaatgtcacaagcggtgattatcagaaatattacaacgatatgtatcagacaaaataatgtttttctgaaaaaggaaaatactatgtctgactaacgaagaatgctgcagtaatctggcaagagcgtcagaactgcagcgttttttatttggatcaccgaagatgatttggaattccgtggaaattgtccggtatcaaaataaggtggaaagctcaggaataaaatgatagaataccctatagatgaatgttcgtgatctggacagaaaagaggtatccatgaaaaagattgtgattatcggggccaatgattttcagcgccctttaataaaaaaagccggagaaatgggatatgagacgcatgtgtttgcctggagagacggcgctacaggagccggggatgcggattttttttatgagatcagtattacggaaaaagagcagatccttgagatctgccgtaaaatacagccagatgcagtatcaaccataggttctgatctggcaaatattacagtgcagtatctggcagagaagcttggacttccgggaaacagcagcgcatgtattgaaaattccaccaacaagtttgccatgcggactgcctttcagaaggccggaatcccggtgccgttttttcaggcagtctctgtgggagacagagtgtttccggagagctttccggttattgtaaagcccacagaccgttccggaagcagggccataacaaaggtttatacccaggaagagctggaacaggccatcacacaggcggcagaacagtcttttgaaaacagagcgattgtggaagaatatattgagggtgcagagtacagtgtggaaaccatcagctataagggtgaacacacctgccttgcagtaacaaaaaaatttacaacaggcagtccccattatattgagacaggtcatttgcagccggctcccgtatcggaagaaatgtatggaaaaattcaggatacggtgtttcgcgcccttgacgcacttgaaatcagaaacggcgcagggcacagcgagcttcggatcgacaaagcgggaaatatcaggatcattgagattggttccagaatgggcggagactgcatcggctccgatcttgttcctctttccacagggcaggattttgtggcaatggcagtggatactgctgccgggaaaccgccggtttttacagaaaaaaagaaaaaggtttctgctattcggtttcttatggacagtaacgatctgaaacatcttcaggagcttcagaaagagcatccggataaggtgaaaaaagtggtgctggaaggagatgtggagcaggcgcagattacagacagcggaagccgtcccggattttttattcttcagacagatactatggaagaaatggaagagcttttttatcacggtccctgggaaaatccgctgagggagcttccggtgactccaatacaaaagctgagatttaccggaaacggcagggacaatgctgagacagcacctgtgtacaatcatttttatatgaaaagagaggatcttcttccttattcttttggggggaacaaggttcggtttgcacagaagtttattgaggatatgaaaagagaacactgcgacagcatgatcatttacggaaattatcattccaatctctgccggattcttgccaccctttgtttccagctgcacttgccctgctatatggtccataatacagaggatgtaaaagaggataaagaaacagagaacagcagaatcatccggagtatgggagtaacagagatcccctgcaaaaaaacagaaattgcagacgctgtgcagaaggctgtggatgagctgagggaaaaaggctgtaagccttattatatttacggaaataccagaggcgagggcagagagtgggtaccaatggaggcctacagagaggtttatcaggaaatctgctgtcaggaaagaaaaatgggtattcattttgactatatttttcttgcatccagcaccaacgccacacagtccggccttcttgccggaagtctggaagagggtgatgaacggaatattgtgggtatttctgtttccaggaatgagaccagaggaaagcaggtaattgcccggaatctggaggagtatgcgcagatgcataaaagcagcctgcctcagaattttaaagagaagattctttttacagatcaatacatggaaaacggatatggaacctactcacaggatacggcagatctgattcgcagtatttaccggtcagagggcaccccccttgatatgacctatacaggaaaggctttttgtggtatggtaaaatatctggaggatcatcagatccggaataaaaatattctgttccttcatacaggaggaactccgttattttttgattttctggaggagtacaacctgtaaatatgaaaaaacttatgattttaggagccagctattctcagcttcctctttatgaggctgcagaaaggcttggcataaaaacaatagctgcaagcactcccggtgactggccgggatttcaggcagcagatgaaagtacgtacacagatatttctgatcccggggcggttatggaagctgcccgtaagtttcaggcggatggcattaccacctgctgtctggatacaggagtccgggcaataggttatgcctgtgagagactggggctgaaaggtctgtcagaaaaggcggctgatatcagcagcgacaaattcaaaatgaaagaagcctttatggcagggggagtgcgctgcgcccgccacatctgtatcagaaaccgggaagagcttgcagaagctctggaaaaactgaattttcccgtagtgataaaggcagtggatctgatgggaagcagggggatattccggtgcgataccagcgaacaggctttttccttttatgaaaaaaccatggaagctacaggtaaggattattgtcttgtggaagagtttattgagggagaaccctttggctgtgaggcaatgatgtcagagggcaggcttttatactgccttcccaataatatagatgcttttcagagctatgtacccactccggtaggtcactctgttccctggaaaaaacaggacagtctgggagaagaggcgaaacgtcaggtaaagcttgctatccgtgcagtggggctggataactgtgcagtaaactgcgaccttattgaaaaagacggaaaggtttatgtgatcgagattacgggaagagcaggagccacctgccttccggaaacagtaggactgtattacggcatcaattattatgaggctattgtgcgtcttgcccttgatatggagccggaaaagctttttaccaaaccgtatccgggaagcgccagcctgtctaagattctgacctcagacagaagcggaaccgtaaaagcgatccgaaatgaaaatgcgcctgcagaggatatcattgatctttcctttaatattcagccgggagattatgtgaatcagtaccggaatggaagggatcgtatcggacagatcattcttgcagggaaagaacttcatgactgcgaagagaggctagatgagattttgtcgaaaattaacattgaatttacagtatgattgtgagaaaataacatgagaaataatgaccatgccttaaagaaaagtacatttttgctgctgcatatcagccttttgttcagctccctaagcggtgtctgttcaaaaaaagcttccggatatacggatcatattttttccctgccgtttattttctggtttggacttgtttttgtgatcatgttcggctacgccattatctggcagcagatcctgaaaagaatgccgcttactgtggcctatgcaaaccgtcccgtaactctgatctggggaatcgtctggggagctctgatctttggagaaaggatcacctggaatatgatcgccggagcagctgtgatttttgcaggaatttatcttgtaacaagtgataacgccggaaaggatggtgagaattcatgagcagtcttggaatatccgtatgtcttttgcttctgtcggtttttatctcgtctgtatctcagatcattctgaaaaaggcagcagataaaacctacgaaagcaccctgaaggagtatatgaatcctatggtgatcggagcttacgggctttttttctgttctgtaatactgaccatgctggctttgaagcatgtgcctctttccatgtcaccgatcctggaatctacaggttacatctttgtatcagtaatgggatatatttttctgaaagaaagattcagcaggcggaaacttatgggctttgccctgatacttgcagggatcgtcatattcaacttatagaaacgagggacaaaagagatgctggtatcgattgttataccgtgctataattcagagcagaccatcggcaaggtggtggagcttgcaattgaagaatttgagaaactaaaagattacgagtgtgaatttgttctggtaaatgattattccagagacaatacctggaaatccatacatgctcttacagaaaaatatccaaatgtaaaaggaatcaacctggctaagaattttggacagcacaatgccattatggccggaatgaattatgctcagggagagctgatcctgggaatggatgacgatatgcagaatcatccgtcacagattccacagttccttgacaaaatggaagaaggctatgatattgtgttcggagtgtttaaacagaggaagttttcctggtttaaaaatctcacaggggcagtaagccggtttcttttgtggcatctgctggaccgtccgaaggatatccagatgagcagtttctggtgctgcagaaagtatgtaagagacgaggttgtcaaatacgacggctataataccttccttcaggtattgtttttccgcaccacacataacattgcaaacatagagatcgaacattttgagcgcgaggtgggaacctccaattataattttaaacggggactgaagctgtttatgtcctgtctgaattttaccgtgattcctttaagggcagccacctttttcggaaccctgttctcggcagcaggttttataggcgcagtgatcgtttttatccgtaagcttctgaatccggcagttgccattggctggtcttcgctgatgtgcgccatgctggtactgttcggcatctgtttcctgatgctgggcattgtgggagaatatctgggaaaactgatgctgaatgtaaataagacacctcagtatgtgatccgtgacaaagaaaatatttccgaacaaactgacaacacagataattaagaaacaggaatagcaaatgatagattttaacaggcctgcaattgtaggaaaagaactgacatatattaaagacgccgtagaccagggaatgctttgcggagacggcaagtatacgaagctgtgttctgcatggatgaaggagcggtttcaggtaaaccaggtgtttctgacaacctcctgcactcatgcgctggaaatggcggcatttctctgtgacatagagcccggggatgaggtgatcatgccctcttatacctttgtatccacagcagacgcctttgtgctgagaggagccaggatcgtgtttgtggatatccggccggataccatgaatatggatgaaaacctgatcgagcaggcaatcacagaaagaacaaaggcgattgtgcctgtccattatgcaggggttgcctgcgagatggatgcgatcatggctcttgcagaaaaatatcatctgaaggtagtggaggacgcagctcagggagtagaggcttattatcatggaaaagctctgggaactattggagatttcgggtgctacagcttccatgagacaaaaaattacaccatgggagagggcggcgcccttgttttccagaaaaacgaataccaggaaaaagcagagatcctcagagaaaagggaacagacagaagtaaatttttccggggacaggtagataaataccgctggatcgattatggctcatcttatcttccaagtgaaatgaacgcggcgtatctttatgcccagcttgaggaagcggaaaaaatcgaccgtaagaggcatcagatctataactattaccatgaggggctgaagagtctggaggaacaggaaaaaatccagagaccttttgtgccggaagggtgcaagcataacgcccacatgtattatataaaagtcagagatctggagacaagaagcaggctgatcacttatctgaaagaaaacggaatctgcactgcctttcattatgtgcctcttcacagctctccggcaggcagaaaatttggacgcttcagcggagaggatgtttataccacacgggaaagcgaacggcttttaagactgcccatgttttataatctggaaatgtctgatgtggaatacattacagaaaaaatactctcatttgagttttgacggaggaaacacaatgaaaaataaaatagcaggcactgtggcagccggaattgcggcactgctgatccctgcagtatccgtgcaggcagtaactgtgaatttcggaacagcggcaatagtgagctcagacagcattcagggatggccgaaagggccggacacagtttctgagacagcagttctgattgatgcggatacaggcgcggtcctttatgataaaggaaaagacgagtaccgttatccggcaagtaccacaaagatcatgaccgtgcttactgcgatagaaaacagttctccggaagattctgtaacttttacagagacaggagtccgggatgtgacctgggacagctccaatatcggaatgcagctgggagaaaccattaccatgaaggactgctggtatgcggccattatcaaatcagccaatgaagtgtgcgctcagatggcagagtatgtagggggaacagaagctcagtttattgaaatgatgaatgagaaggccagggagcttggatgcagaaatacacattttgccaatgcaagcgggcttccggattccaatcactataccacagcctatgatctggcaaagatcatgcgggcaggacttcagaacccccggttccggaaagttatcagcgcagccaattatacgattccggctacaaacctcagcgaggcaagaggaatgcatactcatatgcctcttatggcaaaagaatccaatctttattatgaaggctgcattggcggaaaaacaggaaataccaatgacgcaggccatacccttgtagtggcagcggagcggaacggaagaacatatattgcagttaccatgcgtacagcagatctgggagcaaactgtacagacagcattgcgctgtttaactatgcgtttgataattttgatacgctgacagtcaatggaaaaaaaatgactgtgccaaaaggtgtcacagcggatcagcttacagtagagcaggtggacaaaaacggaacaatgctgaaccgttatttttataacggacagtatgtaggctatgcggcgcctgccgcaactcccacaccccaggcggtacagacagcggcagcgggaacaggagaaaatacttccggtacacagacagtacaggaagaagcggaaataccggaatcggaaactgaggaaggactttccgatatgtcaaagatccttcttggattgatggctgtgatggccgtgactcttgtggcattgatgacagccctttactttaaagagaaaaaaatgtacggttccagaaaataggaggagagatatgaaaggtattattttagcaggcggttcaggaacaagattatatccattgacaaaagcgatttccaagcagatcatgccggtgtatgacaaaccgatgatctactatcccctttccacgctgatgctggcagggatcagagaaattctcatcatttccacaccaagagatcttccggtgtttgaagagcttctgggagacggaaagcagcttggaatgcgtttcgagtatgcggttcaggagcagccaagagggctggcagatgcgtttatcattggcgcggactttattggaaacgatgcggttgcccttgttctgggagacaatattttttacggacagagcttttccagagtgcttcagaacgcatataagagaacagaaggggaaaagggagcaaccatcttcggctattatgtaagggacccaagagagtacggcgtggtagaatttgacgaagacggaaaagctctttccatagaggaaaagccggagcatcccaagtcaaactatgcggttccgggactttacttctatgacaatgatgtagtggagatcgccaaaaatgtgaagccttcagcaagaggcgaaattgagattacaagcatcaacaatgaatatctgaacagaggaaccctgaaggtggaaactctgggaagaggatttgcatggctggatacaggaaaccatgattcccttctggatgcggctgattttgtttccgcgttccagaaacgtcagggactttatatttcctgtattgaggaaattgcttacaaacgtggatttatcaataaagagcagcttgtggagctggcgcagccgcttcttaaaactgcatatggaaaatatctgatcgaagtagcggagggcttataaaatgggaaaaattacagtagaaacctgtcacattgaaggattaaaggtgatcactcctgcagtgttcggagatgaccggggatactttatggaaacttataattacaatgactacaaggcggctggcattgaccaggagtttgttcaggacaatcagtccagttccagaaaaggcgttctccgcggacttcattttcagatcaactatccgcaggataagctggtccgcgtagtaagcggagaggtttatgatgtggctgtggatcttcgtgagggctctcctacttacggacagtggtacggagtgctgctttctgcagaaaacaaaaaacagttctttattccaaagaactttgcccatggcttccttgtactttctgattctgctgagtttgcctataagtgtacagatttttatcatcccaatgatgagggcggacttgcatacaatgacccggatattgcagtggagtggccgattccggaaggaatggatctgattctttctgacaaggacaaaaaatggggaagctttcaggaatattccgcaaacaggagcaaaaaggattgaaaaaagagacatggctgccaggggaactataccggaacagaaggctggttctttccctggccaaaaatgattttaaaacaaaatatgcaggttcttattttggaacagtctgggcctttatccagccggtagttaccatctgtgtatactggtttgtgtttggtctggctttaagaggcggagcggacagaggagttccctttgttctctggctggtagccggactggtgccctggttcttttttcaggacgggctgatcggcgggaccaattctcttctggaatataattatctggtaaaaaaggttgtttttaatattcgtatccttcctgtggtaaaggtgatttcagccgggtttgtccactgcttttttgtgctgatcgttctggtgatctatacctgcatgggctatccgcctacctggtatgcccttcagcttatttattacagcttctgtatttttatgctgattctggcagtgacttatttttccagcgcggtggtggtatttttccgggatctcagtcagatcatcaacatcggacttcaggtaggggtatgggtaactcccattatgtggagtttcagcgaccttggtcttacagggattcttacaaagatcctgaagctgaatccggtattttatgtggtacagggatatcgtgattccctgatcgatcatgtgggattctggcagcatccggctctgaccctttatttctgggcttttaccctggtgctgtttttccttggaacaagactgttcaaaaaacttcaggtacattttgcagatgtactgtaaacggagaaaaaaatgagtgaatttgcaattcaggtaaaacatctggacaagatgtataaattatataataagccctcagacagactgcgggaaactctgggatttaaggttccggtcagagagcattatgctttaagagatgtgaattttcaggtggagcggggcgagactgtgggaatcatcggaacaaatggttccggaaagtccacaatcctcaagatcattacaggagttctgaaccctacggcaggagaggtgaaggtggacggaaggatttccgctcttctggagctgggagccggatttaacatggaatatacaggaatcgaaaacgtatatctcaacggaaccatgatgggattttccaaagaagaggtggatgccagacttcaggatatcctggacttcgcagacatcggagattttgtttatcagcctgtaaaatcttattccagcggtatgtttgtccgtctggcatttgcagttgccattaacattgatccggaaattctgatcgttgacgaggcgctttctgtaggagatgtgttctttcaggcaaaatgctaccggaaatttgaagaatttaaaaagatgggcaaaaccattctttttgtcagccacgatttaagcagtatttcccggtactgtgacagagtgattcttctgaataagggagtgaagctggaagaaggttctccaaaacagatggtggatatgtacaagcagcttctggtaggtcaggatcctgcaaaggcagaggaaaagaaagaagagcagaaagaaagctggagccagcagttccaggtaaatcccaatatgctggaatatggtaccaagcttgcggagattgtggattttgcagttctggatgacaaagaccgctgtaccaataccattgaaaagggcagcagtttccggatacggatgaaggtggtatttcatcaggatattcaggaaccgattatggcctatacctttaaggatattaagggtacagagatcacaggaaccaatactctgtttgaaaagaaatctgtggaacactctcaggcaggagatagctgtacagtgacctttgagcaggaaatgttcctgcagggaggggaatatcttctttcctttggctgcaccgggtacaaggacggtgagtttacagttttccacaggctgtatgacgcatgtaatatcacagtggtttccaacaagaacacagttggattttatgatatgaactcaaaagtggagattcgctacggagaaaaagcatgatagaaaaaatcggtaaggcagtcctggatgatacctgttatccgggacaggatttatacagtgacggagccatagaggatgagatgctggaaattgccagaacttatccaaaggagcaatggaaccaggtgatcgcagagaggaaaagctggcccattctctatcatttttcccatgtaagggaaaatattttaagctggcttccgtttaccggaaaggaaaatgtgctggagatcggctccggctgtggagctattacaggtgcgctctgtaaaaaagcagagaaggtcacctgtattgagctgtcaaaaaaacgaagtgagatcaatgcctggagacataaggactgcgaaaatctcacaatacttatgggaaattttcaggagatcgagcctgcgctgacggagaagtatgattacattactctgatcggcgtttttgagtatggggaaaactatattcagagcgacaccccttatgtggattttctgaaaaccattgcccgtcatctgaaaccgggcggacagatcgttcttgccatcgaaaaccgttttggactgaaatactgggcaggctgtacagaggatcactttggaacccttttcgagggacttgagggctatcccacaacaaagggcgtaaaaacctttacccaaaaagagcttacagaaattctggaaaaagcaggaaatctgaaagcgcagtggtattatccgtttccggattacaagcttcccatgaccatatattctgacaggcgtcttcctttaaagggcgagctgaaccgtatggagacaaactttgaccggcttcgcctgcagctttttcaggaatctcctgtgtatgattctcttctggacaatgatatgttcccggagttttccaattcgtttcttcttctgatcggaaaagagcagatctgtccggagattgtgtataccaagttttccaacgagcgggacgcgcgctttgccctgagaacagatatctgtgagccgggaaggtttgagagatatgtgcagaagcttccggcaaatgaaaaggcctgtgagcatacagcccgtctggagcggatttatacagagcttacagaagactataaaaagcaggggttggagcttaatctctgcaaaacagtaaataaggctgcaaggctggaatatctggagggaatgactctggaagaaaaactggatcagcttctggctcaggggaaattttctgagctggaggaactgttcttttattatctgaaaaaggttcagaaccttcacagcacagatacctttatcaaaacgccggagtttgtacaggtattcggggacgtagagctgaccggagagtattcctgcgcaaaaatgtccaatattgatctggttcctgccaatattctgattctgaaggacagacaggttgtgatcgattatgagtggacctttgactttccggttcccgcagactttatcctgtaccggatgatccattattatctggaaagcgacggaaagcgccgtgttctgaaggacagggatttttatggcaaagcaggtattactcaggaggagcttgctgtttacggagaaatggaaaggaatttccagaagtatatgcagggaagtcatgtgcctcttctttccatgtatgaagatgtttctccgggcaaggtggagatccttccctattatgagcagatgagggcagctggggcagagaggaggcttcaggtgttttttgaccggggaaatggattttctgaggaagactcagaagattatcccatgagcagagcaggagtcagcatggagcttgagattccagacaatgtgaagaacctccgtcttgatccgggagaagcatcaggtggtctgatccttcggaagcttgcttttgaaaatgacataaaggcagactttacaacaaatggttttccagtaggagctgacagctattatttcggcgggggagatcctcagtttgtgatcggaaatatcagcggagagaaaaaactcagaattgaaattgagatcatgaaggctcaggaagcgggagaaaagttctggaagagctttggcctggtgtcagcggaaaaggatgaagagatccgcagactgaaagaaaagatcagtcagatggaaaatacaaaagtctggaaattgtacagaagcattaagaaaaaataagctgtcagagagaaatgacagaaaaaaggtctgatggcaaaattccggccttcagatcagacagaatgaggatgaaatatggaagaattgcgcttcagcattgatgaagaaaaatatgatgacagacatggacaggtgttaagccttggaggctggtatgccggatctgacagacaggaaatgagcttctgtctggtgggagacggaaatcaggagcttgttctggctgatcctgagagatatgaaagaccggatgtggctcaggctctggaagcggactttggagagttccttccgggcttccggctgcggattccaaaggcagatcagcttgcagaacagtttcagcagatcgagctgtttcttacagacggagaaaaacgagtttctgtgtggaagaagagcgcagatgagctgaaaagctttctgaaccaaagcctgctggaatatcatctggacagagtggaaatcctttatgataccatgctggaaatccagggctgggctgtggatcagaggggtgagacggagatcaccgctttaaatcaggacggaagtccttttgcctgcaggataagcagagggcggaggccggatgtggcggagcgctgcagccttgacgagatttataaaaatcaggaaatcggcttccgtatttcagcctctttagatgaaatttcaggaaagaagcttctgcttaaatttacaggatcttctgtggaaaaggcttatgaggtagatattcagaagcttcgtaaagagcagaggccaaagggattttttaacaggcttctgaaccgtcaggaaaacactcagggagattatgaacaatggctgaaacgtcattttctgagccggcgtcaggcatggaagcagaagcatacttcttttgacagaaagcctttgatcagtattgtgatccctctttactgtacgccccttccctatctgaaggagctgatcgagtccgtcagaaagcagacctatggaaactggcagctttgtctggcagacggaagcccggacgaaaacgttcatgagtttctgaaaaaaaattacagacatgaggtaaggatcagttataaaaagctgaaatccaacggcggtatttctgtgaacaccaataaggccatggagcttgccagaggggaatacctgatgctctgtgatcatgacgatactctggagccagatgcgctgtttgagattgtaaaggcaattaatgatcaggatgctgatgtgatttacacagatgaggacaaggtcagcatggacggacagcattattttgatcctcattttaaatcggattttaatctgttccgtttccgggataataattatatctgtcatatttttgcagtaaagagacaggtggcagagcaggcgggatatttcaggaaagaatttgacggagcccaggattttgattttattttccgctgctgtgaaaaggcagagaagatcatccatattcccagggttctgtatcactggcgctgtcatatggattccacggcagcagatccggaaagcaaggcctatgcttttgaagcaggacgaaaagccgtggaagagcattataagagaatgggaatcccggcaaaggtggagatgacagaacggcccggctggtacagaagcagactggagatccagggaaatccgatgatctctgtgatcattccaaacaaagaccatacagaagatctggagctgtgtctttcttccatggcaaagcgcacctcctatgagaattatgaggttttagtggtagaaaacaacagtgaggaaaaagaaacctttgcctattatgagaagcttcatgagcgttatccaagggtgagagttctgacctgggaaaaagagttcaattattcctccatcaataattttgccgcagagcaggcaaaaggagaatatcttctgtttctgaacaatgatgtggagatcctgacccctgactggatggaggaaatgcttggaatctgccagcagaaggaggtttccattgtgggagccaagctgtattatccggatgacaccatccagcatgcaggagttgttctggggctgggaggtattgcaggccatgtgatgtgccgggcgtccagagaggatgcaggatatttcggcagaatggtaagcgttcaggagatcagcgcagtgacagctgcctgtatgcttgtggatgcctgtgatttccgggcagtgggaggctttgatgaaagcttccgcgtggcgtttaatgatattgacctctgcatgaaaataagggatatgggaagaaaaatcgtctttaccccttatgcggagctgtatcactatgagtccaaatccagaggcctggaggacactcctgagaaacagtaccgttttgaaaaggaaataacacgttttcgggaaaaatgggaagatcagctgaaaaaaggcgatccttattacagccccaatctgtctgtgacagagggcgactgttccctgagagaagactgagaaattgtgaggttggatatgtcaagagagatttttgaggtaacaaaggaccggtttcacctgaaggatccctgtcagtatattctgcagggaacctggccaaaggaagcaaagatgcgcgcctgtctggacggctctgaagtaaaggcggagattcagcgcctggaggtagtcagcgctctggaaagatttaaagatccggatctgatgagaggcgagaggatcactgcgtctgtgcagcttcctcagtctctggaaggctgtcagaagctgaccgtgtatgcggatatgccggaccggcggatctgctggttttccgtttctgcaagggaactggaaaaaagaagaggaaagcctcagttttttattgaagaagaaaaggtgcagcagggatttcttcggatcagaggctgggcagttgcagacgagccggtaaaaattcagatttttgatgaaaacaaacagaaattaaatgtggagatccttcgcacccagcgtgtggatgtggaacagctttatgaggaaatggacagtgaagacaagtccggattttttgtggagcttacaaaccttaccggaaagcttctgtaccttgtgttttacgcaggagacacaaaatctgtccacattgttcatttgaatcctgcggttgttttccgcaaaaaaatagaaaaatatgcaaaaaaaggtctgcgctactggaaaagccagggaagtgcggctatggtaggcaaggtggtatccaaggtaaaaactgcgtccacaagggagattccctatcagaaatggatcgtccgccatcttcccggctcaaaagaactggaaaagcagagaaggacaaaatttgaataccagcctaagatttctattgttgtgcctttatataagacgccggaaaagtatctccgccagctggtggatactgtaaaagctcagacctatccaaactgggagctttgtctgtcagacggcagcggcgcagattctcctatccgtaagcttctggactctctggcttcttctgatgaaagaattaaagtgatctttcatgagaaaccgctgcagatttccgaaaataccaatgcgggaattgaggctgccacaggtgattacattgcttttgcagatcatgatgatgagctgacgcctcacgcgctgtttcagtgtgtaaaggccttaaacgaaaacagggacatccgtattctttattctgatgaagataaaatgtccatggacggccacaagtttttccagcctcattttaagccggattataacccggatcttttgtgtacggtaaactacatctgtcatctttttgtggtggacagagagatcatcagtcaggttggaatgcttcgcaaggagtttgacggggctcaggattatgattttattttccgttgtgtggaaaatgtaaagccggagcagatttatcatattcccagggtcctttatcactggcgctgccatgaggattccacagcagagaacccggaaagcaagacctatgcttttgaggcgggaaaacgggccattgaggagcattataagagaacgggaatcaacgcagaggtgcttcagggagagtttctgggactttaccgtacaaggtttatccgggaccatgatccgctgatctcaattatcattcccaataaggatcatattgaagatctgaagcggtgcatggactccattgacaaaaaatccacatatcagaattacgaatatattattgtggaaaacaacagtacggaggaggaaaccttccagtattataaaaagctggaggcagagaatccaaaggcgcatgtggtttactgggacagagagtttaactattctgctattaataattacggagcttcttttgcaaagggtgaatacatccttcttctgaacaatgacacggaaattatcaatgaggactgtctggaacagcttctgggatactgtatgcgaagcgatgtgggagctgtgggagcaagaatgtattatgaggacgacaccattcagcatgcgggagttgtcattggcttcggcggcattgcaggacactgctttgtgctgcagccaagaggaaccacaggctactgccacaggattatctgcgctcaggattacagtgcggttacagcagcctgcatgatggtaaaacggtccgcctttgatgaggtgggaggccttactgaggagctggcagttgcttttaatgatattgatttctgtatgaagctgagagccgcaggctatcttattgtgtataatccttatgcagagctgtatcattatgagtcaaagtcaagaggccttgaggacacaccggaaaaggttgcgcggtttaataaagaaattcagatttttgaaagacgctggccggatattatgagggacggagatccttattataatccgaatctgacattgaagagccaggatttttcactgaaaaggatataggagggactggaaatgaaggtattggttacaggagtaaacggacagcttggtcatgatgtgatggatgagcttgcaaaaaggggctatgagggagtaggcgtagatgtggcggaaatggacatcacagacgcagaggctgtgcgcagagtgatggaagaggtgcgcccggataaaatggttcactgcgctgcatggacggctgtggatgcggcagaggatgaagtggaaatgtgccgcaaagtcaatggggagggaacagaaaacattgccagaatgtgcggggaaatggatattccaataatctatttaagcacagactatgtgtttgacggtcagggaacccgtccctgggaaccggatgatccggtggtacagccgctgaatgtttacggtcagacaaaatatgagggcgagcttgctgtagaaaaatatacagacaagtattatattgtacgtattgcctgggtgtttggcgtcaatggaaagaactttatcaaaacaatgctgaatctgggaaaaacacatgacacactgactgttgtggacgaccagatcggcacacctacctacacctatgatctggcacggcttcttgtagatatgctggaaaaagaagagtacggaaagtatcatgtgacaaatgagggaggatatatttcctggtgtgattttgcaaaggagatcttccgtcaggcaggaatgaacgtaacggtaactccggtaagctccgatcagtatccggcaaaggcaaagagaccttccaacagccgtctggaaaagaaaaagctgacagagcatggctttacccgtcttccggactggcaggatgcccttgcccgttatctgaaggagatcatgtaagcagatatggataatacacataagaaaaaaagagcggtggataaagccaccgcttttactaaatggtgtggaaaagatctgaaatatcctgcgcttctgtttctgctgatggcattcagcagtctgattatgttccaggactatcttttgggagatcagctgatgatttttaacgatatcggaagcgacacctggcagcagtatattatgaattacactgccattgtcaatgatatccgggacggaagcttttctctgtgggatttttccaacggactgggcgtgaatctttttaatttcaacctgttcgatcccttcctgatgctgctgtacggccttggggtaatcctggggcctgcacatatgctgatgtatctgaatgtgatacagattataaaaatgctgatggcgggtctggtcttttactggtttttatctcagttttccttcagtcccagggcaaagctggccgcttcctatgcatacggcttcagcggtttccttctggtgtggggacagcattatcagtttggaacagcagtgctctaccttcctctgcttttgcttttctgcgaaaaatttatccagaagaaaaaaggaagaggattctttccggtgatggtatttctctgcggaatttacagcgtgtatttcacctacatgtgtctggctgccacagggctttatcttcttttcgggattttgatggtggatgatctgacactggcacagagagtgaggaggtttctgctgggctgcggagaaatccttctgggtgtggggatgagccttgtggtatttcttcccatggcagaggtgcttctgaatgtttcttcccggcttgacagccagggaaccggattcctgcagtggcttcagcagtgctttactccttatcacacaaaggtctatgattccatgataaagcatctgttttccagcaatctgcagaacggcttcggccttgcaaaaggtcctcagtcctatgctatgaattattatgaggatcccatctttttctgctctgtgctggcagtgtttctgagtgtccagttcctttttgtactgcgcaagacccagatgaaaaaaagggcaaaaacagtgctgtacagcgctgcggttctgatttttattggcgtggtctttccggttggaggaacagtgtttaattatttcacaaagcctacgcagagatatacctttgttctgatcccgttttttcttatggcaatggcatggatgtgggattatctgagaaagggcggaatgctctgtctgactttaatactggcggtaacagttcttatgggctgggcatatctggaaggctggaaacaggcaggctttgcagaatataaaagaaatatcctgatcctggcagtgacaggaaccgtgctggcagtgtgtcttgttcttttaaattttgtacataagcaggctgtgcggcaggggcttatggctgtgctggcgttggctcttctggtgaatgtagcgtccgagggcgcagcgaattttcaggcaagagttaccatgaagaaaaccgatacacctgcagagcttatggagcaggaaatggctaagtatgaggctgacaggaaatcagatgataaagaaacaaaataccgggcagaaatgaacaagccacaggattttttcagagaaatgtatcgggcagacctggggcagtgcctggagtatctggaacagaaagaccagagcttttaccgggtggaaaaggattacatatcaggaacagttgccatggatgcttccgcccagggctataatggtatttcttcttataattccgttatgaacggctatgtgaaggaatttgtggaaaccttctgtcaggagctgttttttgcagaccagaaccattatacattctggaacaatgtagaagaaaaccgtcttgcagcgttccttggaatacgctacctgctttccggacaggaaacacctcaggaaggctggaagcttctggacagagtgggaagcctttatatccatgagaatgaggctcaggcaggaaccgcgcatttttatacggatgcggtgacagaggagagcgtgaaggcgctgtgcagcgaggaaaacagagatgagcttctggaaagtgtgatcgctcttccacaggaaggagagggctcagagaaagaggtactgaaaagtggcggaaactctgaggcagaaaacaaaactgtgaaatcctcagaggatgatccggcatatgagattacagatctggaagaggtttctgacattgaaagcgttgtttccgaacaggacaggcaggtaatggaagcttcagagatcattctggatgctccggaaaaggatgcttatattacaggaaccgttcatgcggaagctgacggctatggagtgtttatgattccctatgaaaagggctggaaccttactgttgacggaaaagaaacagaacttttaagaggcgatattggctttctggcatgtcggctcccggagggggatcacagtctggagctgaaatttgaggctccgggtctgaaggcgggagcagccggaagtgcagtattctgggttctgtttgcagtgaccagggcagtgtcccagtggaagagatacaaactgaaagtgaaaagtaaataagaaaataagcttttgcagcagacgaaaaagtaaggctcagaaataaggagttccaggtgatttatcagaaatatgtctgaaaatggaggtaaaaggatgaagtttgcatttttaattatgggaaaatttaacagtgaaacagataaagcggcaatccataacggcgtgtctcagctgatcggcgttgcagatatagaagatgcctgccggacagccagaaacctgtatgaaaatggaattgactgtattgagctgtgcggagcctttggcgcagagggagccagaaaaataatagaagccacagaaaacaaaatccctgtaggctatgttacccacctgccggagcaggaggaggtgtaccaggctgcgtttccacaaaaataaagcccatgtatcgggagcagagagccggggagaactgtgatcctatgtcaaacaaaaaagaagtttctgtaaaagtggaagggaaatccactttgcggaagctccttttttgtaaagatttctgtgagataatttgtgtagttttataatgctgtggtatagaaggaaatccgttttttaccatattttcagactaaaaaagaagaaagatgattatgatacctagtatcattaatccgaatattattttaagaataatatttttgctggcatatatcaacagcattaacgatgcgcaccataaaacgcctgcaatataaaaaacaatatcattactatatgccatcatacttaaaaatagaaaaataccggttaagacaactcctctttctccaaattttttatatttttctctttttatttcgtccatactgctgccctccttatcataactgaaaatctgtttttgtataaacatttaatagataatatccaataaactgtgagtccatttctgtatattctactacgctacaaaaactggtatcctgaaaattttgtgtaaattatataatttcatattttaattcagataaaatacattttattacataattttcacgctcttatcttatgatacaaaggtacaatagacatgcagtattgtcaagctgatatttcagcccataaaaaacagcgcagctttacgccgtgctgtttttcaaaacctatttcaggaatttattgatcagatacacaagaatcgtcagaatgatgattactgtaaaaatactcagcattcctttccacataacctcaagtgcctgcataataagctcagaattcatagagatatctcctttctcttacagaatacttgcaacgacattcaggataacaccacctgcaacaacagaagcgatctgaccggatacgtttgtacctgtagcctgcatgatcagaacattgcttgggtcctctttaagcgccattttctgaactacgcgggcagccatcgggaaggcggaaatacctgcggcgccgatcataggattgatcttttcctttgagaaaagattcataagctttgcaaaaagcacgcctgcagcagtgtcgaagataaaggctgcaagaccgatcagcataataagaagagtttctttgtttacaaaggtgtcagccttcatactgaacgcaatggtaataccaagaagaagggataccagattggacagtacgttctgtgcggtatcggaaagattattcagcacgccgcactcgcggagcaggttgccgaacatcaggaatcctaccagagaaacggacatcggagctacaaggccggcaataaaagtaacaacgatcgggaaaatgatctttgcttttttggaaactgtagccggtttgtattccatatggatgcagcgttctttttttgttgtaagaagcttgatgaccataggctggataataggaacaagcgccatgtaggaatatgccaccacagcgataggccctatgtaattggagccaaggacctgagatacaaggatggaagtagggccgtcggctgctccgatgataccgatagatgcagcgtcttttaagtcaaagcccaggaaacatgcaacaacgattgcggcaaaaataccgaactgtgcggctgcgccaaaaagaaacagcttggggttggacagcaaaggtccgaagtcgatcatggcgccgattccgataaacagaagcagaggcattgcctcggaagcctcgatacctacattgaacagccactcgataataccatttgtttcaccgatacctgcaagtgtctgattcagaacaccggaagcaggaaggtttacaagaattgctccgaatcccagaggcagaagcagtaccggttccagatccttattaatggcaagccagatcagcacagcgccaatcacgtacataacgatctgctggggggtgatagatgtgatgccggaaattaaaaaatccatactggttcctcctgatttttttcacgggaaagtctgcctgaatattttcagtaaaaaagacctgtgctcccctgaaagcggaacacaggtcttgtcgtataccaaaagcataaggtatagattaagccagagccggaggctcaaggtgttgacttaatcgcaccatacagtgctgactactcccctatatcaagagtattgtaccgtatggaaaagtatttttcaagaaattttttgtaattctaaaacatacagagtgaaaagccgccgcccggggtgatcgggaatccattttccggttactgaaaacagtagctgaggtgccctgccagctgtcaggcttttgctgtttttataattctgtagatcagaaaaccaagaagcagaatgccagcaccggcgatcacatagtaaggaacagccgtatgcttttcggagtagtttctggcagcttctatatttttctctccggcatctgtaagagcagtatcctgttcctgtacggcagccattattgaggttcctaccggagcgtttccaaaataatactgacgggtgtactgaccattttccggtgtgccgtcttttgtggtaagagagtcggcagcggttcccacaggaacataaacatttccgccggaaagcatgttaaagtctgtatcgccaagagagagcatctggaagttgtcaaagccataatttaaaaggcttccggcttcggcggctgtggtgccggatgcgccctgaagcacaactgcgatcagggttactccgtttttttctgctccgcatacaagggtgctgccggaagcgtccgtatatccttcacgtcctccaagacagttctgataataagcggcattggcagcgctcatcatggagaaattatttgtcagtacccgctcgcctcctgatatgttggtaggagagatagtataggaaagggctcctgcaatggtacggaaagtttcattttccatggcggcctgcataataagagccatgtcatgagcagtggtgtgctggttttcatcagaaagaccggtaggattggtaaacactgtgttggtgcatccaagctcggcagccctctgattcatcatctgtacaaagccttccacagagcctccaagatgttcggcaacctgcagggcaatgtcattggcagataccagcataatagcgtacagacactgctccatggtaaaaacttcatcaagattggcggaaatattggctccgccgtcagtaacgccggaaacgccggtagcagtcatggtaacctggtcggtaagctggctgttttccagtgccagaagagttgtcatgatctttaccgtacttccgggaaaaagctgctgatccatattttttgcgtagacaatggtattggtggattcttccataacaactgcggctgtggaagtgatatcagctccctggggccagcccggaacagcgttggtggtaattccggaagctgcctcggcggctcttaccggtgttggaagcatcagggaaaaagccattcccagggcaaaaagcccggcgcataatttttttattttcataaagtatactcctgtaaaaggttcggtaaataaaggtagtgtgccgcaatactaggacgaataatcctgtatgtggcggaaactgttacaaaatctatcatatcccatttttttatgtaattcaacacttttgtgagcccggaatactgatacacacgttcagccttgcaaaacacgggacgggatgataaaataaacccggattctatgaaaaaagaatgtaaaatgacaataaaccgaggttttatatgaataaagaaaaaggttcagccggcaggatccagtggggacggatgctaaaaaaactcagtccctacaccatacaaaagggattccgctatctgaagcattacggaccaaaggagttctggataaggcttcacgaaagatttgagccggaggaagttccttacggaccgtggtatgaggcttatgtgcctgatgaagcagcgcttgagaaacagagacaccaccattttgagtacagtcctctgatcagtgtggcagtacctgcataccggacaccggaaaaatttctggctcagatgatagactctcttcttgctcagacctatggaaactgggagctttgtattgcaaatggaagtcctgaggacagtgcaatgaaaaaggtgctggaagagtacacaaaaaaagacagccgtatccgggtcagtgagcttacagaaaataaagggatcgcaggaaataccaatgcggctcttgagatggctcagggagaatttgtgggacttctggatcatgacgatctgcttgcgcccaatgccctttatgaaattgtccgtgcgctggatgaggacagaaatcttgacgcggtgtatacagatgaagataaggtgacaactgagcttgacgagcattttcagccgcatctgaaaccggattttaatctggatcttctgagatcaaacaactatatctgccatttttttgtggtaagacgttccattgtacaaaaggttggaggattctgtcaggaatttgacggagcccaggatcatgattttatcttccgctgtatcgaaactgcggaaaaggtaggacatattccggaaatcctttatcactggcgtactcataaggcatccaccgcagacaatcctgccagcaaaatgtacgcttttgacgcgggaaagcgggcgatagaagcccatctgaagcggacaggaacagaagggatcgtaagccatacgccggatctgggatttttccgggtaaaatatccggtgcagggccagccgcttgtttctgttattattccaaataaggatgaaaaagaaacactgaaggcatgtattgactccatcagagaaaaaacagagtatcccaattacgagatcattattgtggaaaacaacagtaccacagatgagatttttcagtattataaggaattgtcgcaggatccccgcatccggcttctcagatggaaaaaagaatttaattattctgccattaataactacggagtccgtcatgcaaatggagaatatctgctgtttctgaataatgacgtcactgtgatcacacctggatggatcaaagaacttctgggtgtctgccagcgccctgaagtgggagcggcaggcgtcaagctgatctatccggacaataccattcagcatgcaggctgtgtgatcggacttggaggaattgcaggccacatgtttgtggatatgccggcaaacagaaccggatatcttcataaggcgtcgatccttcaggatatgagcgcggtgacagcagcctgtatgatgatgaagcggacagcctttgaggaggcaggtggatttaccgaaaagctgtctgtagcatttaatgatgtagatctgtgtctgaaggttcgaaagaatcataagctgatcgtctatgatccatatgtacagctttatcatatggaatcaaaaacacggggagcagaggataacaaagagaaggtgcgccgtttccaggaggaaattgagtatatgcggtgtcagtggcttgatattctgaaaaagggagacccttattataataagaatctttctcttacaaaatggaattattctcttcgccctcttccgggaatgacgaagaagcaataaggaggagttatggaagtatcggtaatcataccgaattataacgggattgcgtttctggacagtgtacttggaagtctggaagggcagaccgcaagaaattttgaggttatttttgtagacaatggctccacagacggaagttgttcttttgtggccggaaattattcctgggtccatatcatagagcttcctgaaaattatggcttctgcagagctgtgaacgagggaatccgtgctgcaaaggccccttatgttctgcttcttaacaatgatacagaagtggctgaggattttgtggaacagatgctcagcgccatacgaagacacaaaaacgcattttcctgcgcagccagaatggttcagtatcatgacagggacaggctggatgatgcaggaaattattactgcgctcttgggtggtcttttgccagaggaaaaggaaaagatatccacacctacgaaaaggaagagcagatttttgccgcctgcggcggagctgctatttaccgaaaaaaaatactggaaaaaatcgggtattttgatgaagaacattttgcgtatctggaggatacggatattggatacagggccagaatttacggctatgaaaactggtatgctcctgaagcgctggtttatcatgtgggaagcggcacaagcggttcccggtacaaccagtttaagacaagatattcttccagaaacaatgtatatctgatctataaaaacatgcccttgcttcagatcattctgaaccttccgtttttgcttcttggctttggaacaaagcttttgttttttacggtaaaaggaatgggaaaggaatatcttgcaggcatcaaaaacgggttcagtatcagcagacaggggaaaaaagtaaaattttctatgaaaaatctgcctcattacgcaaagatccaggtggagctgtggatcaatatgttccggagactggcagcgtaaagtgtttattacagagtttcactgaaattttataaaataaaccttaagaaaacattgattttgaagaacaactattataatatagatgaaatggattgaggtgtcagagattgattcaggataatcagaagaatttcagccgccttcagatgctgatagatgtaattgtactggcagtttcctatgtaagcgcatggtttttgcgctttatgggaccttttgcctattcggcagaaaaaggtctgagctttgaacagtacatgttgcctctgattttcattataccgggctatctgctgttatatcaggcatttactctttatgagcctcttcatatgcaggggcgcaggcttatgcttgccaatatcatcaaggcaaatgtgttgggaatgctggcttttgtattccttttatatatgctgaaagagagtgatttttcccgactgacagtatatattttctgtgtggtcaacattctgctggaatggggcgtccgtatgctcatctttgctgtccttagagacatgcgaaaaaaaggtctgaatcagaagcagatcatactggtgggctacagccgtgcagcggaggaatatattgacaggattgaggcaaatcctcaatggggatatattgtcagaggaattctggatgacaatgttcccgcaggcactatgtataaggggatcaaggtgatcggcagaattgccaatctgacagtgatacttcctgccaacaggcttgatgagattgccatcactcttgggctaagcgaatattaccgtctggaagaaattgttgccatgtgtgagaagtcaggcgtgcatacaaaatttattccggattacaataagattattcccacaaagccatatacagaagatattttgggactcccggtgatcaatatccggtatgtgccgctgagtaatacctttaatgctatggtgaagcgggtaatggatatctttggctccattgcagcgatcattgtatcttctccggtaatggcgctgatgtgtatactgataaaagcaacttcaccggggccactgatctacaaacaggaacgggtagggcttcataacaaaactttctggatgtataagttccgttccatggagatccagccggaggcagaagaaaagaaagcatggacagtcaaaaatgatccccgtgtaacgggaatcggaaagtttatgcgcagaacaagtattgacgagcttcctcagctctttaatattctgaaaggggatatgagcctggtgggaccaagaccggagcgccccttctttgtagagaaattcagagaagaaattccaagatatatggtaaaacatcaggttcgtcccggcctgacaggatgggctcaggtaaatggataccggggagatacatccatcaggaaacgtattgattgtgacctttattatattgaaaactggagcattggttttgatattaagattttgttcctgacaatttttaaaggtttcattaataaaaatgcatattaaaaagataaggggaaagaagatggcaaaaccaaggtcaaagacaaaaaagatactgtttgcagttgagatcattgtactccttctgtttatcggaggtctgtatgtttacggacagctcaactccagactggacaagcttgaaaagcccaagacagaaaacgcgcagcccatagaggtaaaccaggaagtacaggattctatcaatgcggaagaatcaaaactgacaggatataccacctatgcgctgtttggtattgaccacagagataaaagcgctaccggcggcatgaacagtgataccatgatcattgcaagtgtaaataatgatacaaaggatgtaaagcttgcatctgtatacagagatacacttcttaatgtttatgatgatacttattccaaggcaaacgcggcctatgcgaaaagtccggaagcagcagttaatatgctgaacagaaacatggatctgaatattacagattatgctactgtgaatttttcagctctcacagagattgttgatgcactggacggtcttgacatcgatatgtcctacgcagagatcgtgcacatgaacagttattgcgaagagacttcaaaagaaaccggtaagccgtatgaaccgatcgaacttccggaaagacctgaggacattgaaaagattgattaccgttttcatctgaacggtgtgcaggtaacctcctactgtcgtatccgttatacggcaagtcttgatatgggacgtacagagagacagcgtaaggttatccagctgatcgttcagaaagcaaaaaaggcaggacttcctacgatctttaaggtaatggatgctgtgttcccaatggtatccacatccatggataaaacagaaatccttcagcttctgcctacagtgatcggctacagcctgaatgagacaaccggtttcccgtcaagcattaagttttccaatgtaaagggaagcgtaatcgttcctacaaaagaaggtacctcagaggcagaccttgtatccaatgtaattgctcttcacaaattcctttatggagacgaagcatatacaccgtccagcacagttcaggagatcagtgccaagattgctgagatcgtcagcggactgggtgaactggaggatacacagaagattactgctgaggatgagaatacagcaaacgacagtattatctttgaaaacgatggttctggatgggttgacaacagtacagattgggtagatccgggaaccggagatgacggaagcagcgactgggtagatccgggaaccggagataccggtggtggagatactggcagtggagataccggaagcggtgatgttggcggtggagataccggtggcggagacgttggcggtggagatatcggtggcggtgatgctggcggtggagatatcggcggcggagacgttggcggtggagatgccggtggcggagacgttggcggtggagacatcggaggcggagacgctggcggtggtgatgttggcggcggcgacatgggcggcggagatgccggcggtggagacggtttcgtagatgagggaaccggagaagaagttatgtaatcaaagttataagaaaagggaatttcttaaaaagaaattccctttttgccagtttgggacaaaggaaaaccagaaagagagaaaaacatgaaaaatgaaaaaattgatgtgatcattccgacataccacccaggcaaagaatttgcagctctccttgaatgtctggaacagcagtcctgccctgtcagcaggatcattgttatgaatacagaggaacagttctgggataccaggtgggaaaaagagcatccctgtcttgaagttcatcatttgaaaaaagaaaattttgaccatggaggaaccagaagacaggcggcagagctttctgatggagatgttatggtttttttgactcaggatgcgatgcctgctgataaaaatactgtcagccatctggtaaaggccctgaacagtcaggagaatatcggagctgcatatgcaaggcagcttccgaattcttcctgcagttttgtggaagcatatacaagatcctttaactatccggatcagtcaggggtaaagacaaaagatgatcttcccgttctgggaattaaaacttttttctgctccaatgtatgtgctgcctacaaaaaagatatttacaggaaactgggaggatttgtggaaaaaaccatttttaatgaggacatgatctatgcggcagaccttattcacgccggatatggaattgcatatgctgcggatgcaaaagttgttcattctcataattattcctgcagccagcagtttcaccggaactttgatctgggagtttcccaggctcaatatccggaaatttttgatggagttccatctgagggagaaggactccgcctggtaaaaaagaccttttcctaccttgtaaaacatgggaaatggtatctgattcccggatttatcatacagaacgggtgtaaatatgcaggatattttatgggaaagcgctataagaagttatcgaaaaaaatgatcctccggtgcaccatgaatcagacatactggaatgaatcaaaataataaaatgattttcgggaacactgttttttaaaggtattatcacattttgaacacaattccctgatacacttgtgtcataacaataagaaagtggtgaagggagggaagaaagcccatggattatgaaaaggatcaggatgtcagtgattccggaatgcatgagatacaaagcagtgagccgccccggtacgaacattatcagatgcaccggcacagcggaagaatggagcagaaatcccctgtaaaaccaaaaaagaaaaataatccgggaaagaagattgcagaaaccatagctctggcagtggtgtttggaataacagccagcgcggtgtttcagtgttccaatacagttgcagaaaaatatttcagaaaagagacagaagctgttcagctttctgacggcagcgcagaacagaccggacagacagctgctccgtcaggagaagcttccacaacggcaggaagtgtggcagaggtggcagaatcagcaatgccggaggtagttgccattacttctgtaagcattcaggagattccaagctttttcggggcttacgggttcagtccttatgggacagtagaacagttttccagtgagagcagcggatcaggcattattgtaggcgaaaacgaggatgagtttctaatcgcaaccaataatcatgtggtagagggagcaactacactgagcgtgtgttttattggtgatgatgtggcaaatgcagaggcggaaacaagagatctggcaagcggagacattaatgtggaggatgcagtcagcgcaaagatcaagggaactgataagggaaatgacctagcagtaattgcagtacagaagtcagatattccagaggatacccgttcagagatcaaggtggctcagatcggcgattcggatgggcttcaggttggagaacaggtagttgccattggaaatgcacttggatatggtcagtcagttacctcaggatgggtcagcgctctggatcgaagcatttccagcgaagacggaacaactaccacagggctgatacagacagatgccgccattaatcccggcaacagtgggggcgctcttctgaacatgaaaggggagctgatcggaatcaactccgccaaatatgctgcagatgcagtagaaggaatgggatatgcaattcccatatcaacagccagccccattctggaaaagcttatgaaccggcagacaagagataagctggatgtttcagagtccggttatcttggaatcagcggaggcgatctgacaacagaggcagtgcagatgtttggtgttccggcaggagcttttgtccgtgatgtggatgagggcgacgctgcggaaagagccggccttcagaaaggtgatgtgattgtggagctggatggtcagccggtaacgggaagtgacgatctggcggaaaagctttcctattatgcagcaggggagacggtagaaatggtcattgcaagggctgtcaacggagaatacgtggagcagacaatggaagtgacgctggatgcaagaccctcttccggatattgatcagaatttttataaaaactttagtttacaggcacagaggttatgatataatggacgcataggcggcagaatcctgaagaaacagagctgaccacctgtgcgttttgtattatgacagaacggaaaggagtttatatgacagacaaatacgaagatgaggtaattcaggaagaggatcacgagaataaagatgagaacagacgtggtccggaaaagttttgttccctttgccggagatctgaacggcaggcgggcaggatgattgatcttccaaataatatacatatctgttcagactgtatgcagagaagttttgacaccatgaatcagcagatgagcagcggaaagtttaattataatgatatttttaacatgccgggtgtaagcatggttgatctgggcagcttccagaatcagatgtcgcagcagcagagcgctcccaagaagaaaaaagaagaaaagcacaaaccggttctggatctgaaaaagattccggctcctcataagatcaaggctgcgctggacgaatatgtgatcgggcaggattatgcaaaaaaggtaatgtcagttgcagtttataatcattataagcgtgtagcaacagacaccatggatgaaattgaaattgaaaaatccaacatgctgatgatcggcccgacaggaagcggtaagacttatcttgtaaaaacacttgccagacttctggacgtgccccttgctattgcagatgctacctcccttacagaggcaggctacattggcgatgatattgaaagtgtggtatccaagctgcttgcagctgcagataacgatgtggaaaaagcagagcacggcattatttttattgatgaaatcgacaagatcgccaaaaagaaaaacaccaatcagagagatgtaagcggcgaggcggttcagcagggaatgctgaagcttctggaaggcagtgaagtggaagtgccggtaggggcaaacagtaagaatgcaatggttccgctgacaactgtgaatacaagaaacattctgtttatctgcggaggagctttcccggatctggaaaacattatcaaggaacgactgaacaaacaggcgtccatcggattttatgctgatctgaaagacaagtatgacaatgatccccatattctggaaaaggttactgtagatgatatcaaaagctttggcatgatccctgagttcatcggccgtctgccgatcatctttacccttgacggactgtctgaggatatgcttgtgaagatacttatggagccgaaaaatgccattttgaaacagtatcagaagcttcttgccctggatgaggtgaaactggaatttgacgagggagctcttcatgctattgcggcaaaagctatggagaaaaagacaggagccagagctctgagagcaattctggaagaatacatgcttgatatcatgtatgaaattcccaaggatgacaatataggacaggttgtgatcaccagagaatatattgaaggaaacggcggaccgaagatccttctgagagggcaggaaattccgcttctggaaacagctcagtaaatggtgaccggaaaggagaaacggttatggcaaaggatttttttgaagaacttggagaagcaatcacaaaaacagcaagagaaatcggcggacgcgcagaggttctgtacggaactcagaagctgaaaaataaaatatccggcgaggaaagacagattcagaagattatggaagagctgggaaaagttctttacagaagataccgggaaggcgtgccgctggatgatctgcagaggcgtctctgcgagcagattgatcagaggatgacaaggatcgagcaatataaagaagagatggcaggagtcagatcaaagaaggtgtgtccgtcctgcggaacagtcgtagatcaggacgcagcattctgccatcactgcggagcagcctgcacaacaaaggaaaaggaagaggcggcaggcagcgtcattgacggaacaatggatgagactgtaaaatcagaagaagctccggcgtggaaggttactgcagatacatcagaaccggaaaaagagaatacagcggaagaaccgcagaaagatccggtttcagaagaagttgcggaacagtcagagtcagagatgtccacagaaactgaagaagcagatcagaaaatcctgacgcaggaagcagaagaaaaacagccggaagctgaaatatcaacagaacagccggaaatgcaagaaaagctgatctctgaagcatcaggcgagcggtcggaaatgccagaagaactgacctctgaagttcagaagaaacagtcagaatctgtaaaaacagaagaaacatcggaagaaaaaacaagaacagaaaaaatgcctgaaattccggagggatagtcagagcagtcagttttacaggaagctgtatatcctgaaacagaaaattcaagtgatacagcgaatgtgtaagatcaaaacattttgaggggaaaattaatgaaaaccagatttctggcagtcatagacagaaaacgaaaaagcccgtggtttgccctgggggtaaatcttatggcaatgctggcgatgacgcttgttatgcgcccgtcttttgagacaaatgatgatattgtttttgccgagtttggaagtggactgcggggagtgaaaactccccgtcttgtatttcagaattacattctcggactggtataccgcctcctttatcaggttacaggcagactgccctggtatatgattgtgcagtatgcagtgcttgtggcagctttcagtgcagtgacctatgtatttatgaaccggctgaaaggctattggggcttatatttgtctttcattcttttgtgggtgttcggctatgaaagctatattcatattcagtttacaaaaacagcaggaatagcggcggcagcggctgtactgcttctttttcatgtgatcacatctgaaaaattctgtgtctgggagacggtggcaggttttcttctgggactgaccggctttatgtacagagaggatcagttttttgccagcagcgcgctgatggcaggtgttggtatttattttatttttacacttaaaaaacgctttccgggaaaagaatggaaacggtttggcctgtgtgcaggtatctttgggatgctgctgcttgctgtggactgtacggacagactgatgtataaaaatcctcagtggcaggagtatcagaggtttaacaatctgagatcagagcttctggattatggatttccggattatgaatccaatcaaactttatatcaggagctgggaatttccagagaagcatatgagctttacagaacctggaactttaatgatccggacaaatttaccacagaggttatggagaagctggcagagcagaagccggaaaagatactctccggaaaggtgatccattcttttgtaaagcgctttccaggtgatgtgcttcaacagaaagcattctggattgttttactgctgtttgtactgtggctattttttggaaaaaagggatatgctgcgtggtttggacttgccggagagctctgtatgctgggaggactgaatttttatctttattttcagggaagatatctggtaaacagagtagacgtagggctgtggttcagcgtatgtctcacaatggcgtggctattggcagattctgtaaaagagcgtgagaaagcaaaagagcgttcaaaaggcaaagtaggtgctttatctgttcctactgtttctatggaaaagatttccggaaggtgggggcctgttttatgtgcagcagttcttctgattgcacagagtttctggtatgatgactggaggctgactaccagagagattcccaaagcgcgggtaagtcagcgggcagtactggaaaccatcggaacagacaaagagcatgtatatcttgcaaaaagcggcacggtatcagagattgtatgttacggaccttttgaccccatgccggaaaatcttctggataatctgtactggctcagtggatgggaatgcagaaccccggggattgtaaaggagatgcgggaacacggggtcacaaatccatataaagatatgatcgaaaataaaaaggtttatctaattgacgataatattcagctgaccctggattatatccggcagaattatgacaaaaatgcagaggcggtatttgtgaaaacgctgggaaacgtggatttatatcagattcagggtagcgtccgggaataaaatccctgtaaaacaggcggaaaaacaggcttttgcagggatttgaaaaaaattcgcgatttttaaaaaaaattaaaaaaacctattgacttttattagaacatgaggtattataatcaagcagtcgcgagagagcggctgataaataagaaatgcaggagtggcggaattggcagacgcgcaggcttcaggtgcctgtggtcgcaagatcgtgtgggttcaagtcccatctcctgcattatttttttgtgtatcgggaagcccttagttcagctggggctcccgattttttcgtgttgtgaaagaaataatttcctggccaccaatggttaaggctgcttcggcttcctggattgaatcagaattattttcagcgaaacataatttttttcagctactctttatgttgaaaaagaaagtttcttgtgatataatcttgaagatttaggataaaacaagagaaagggagattgtatgaaagcatttctgatattagaagacggccatgtgtttacaggaaccagtattggcgcagccagagaagtaatcagtgagatcgtttttaacacatctatgaccggatatctggaagtgatgactgatccgtcttatgctggacaggctgtttgtatgacctatccgctgattggtaattatggaatttgttatgaggatcaggagtccaggaagccgtggatagatgcatttattgttcgtgaattatcccgtatccccagcaacttcagaagcgttgacaccattcagcattttctggaaaaacatgacattccgggaattgcgggcatcgacacaagagccctgacaaaaatccttcgtgaaaagggtaccatgaatggtatgatcacagttgatgaaaactatgatttagatgcaattattccccgtttaaaagcatatacaactggaaaagtagtggaaaaggttacctgccatgaaaaagagattctggaaggcaaaggaccgaaggtggctctgatggattttggagcaaaacgcaacattgcccgctctcttaatgagagaggctgtcaggtgacgatttatccagctcttacaccggcagaggaaattttaaaagataatccggacggaatcatgctcagcaacggacctggggatcccaaggaatgtacttctattatagaagaaatccgtaagttatatgagtctgatgttccgatttttgcaatctgtctgggtcatcagcttatggcgcttgccacaggcggagacactcataagatgaaatacggacacagaggcggaaatcatcctgtaaaggatcttgcaacaggaagagtttatatttcttctcagaatcacggatatgtggtggatgcagagcagcttgaggcgaaaaatattgcaaagccggcatttgtgaatgtaaatgacggtaccaacgaaggtatggcctatgtaggtaaaaatatctttaccgtgcagttccatccggaagcatgcccgggaccgcaggattccagttacctgtttgaccgatttatggaaatgatgggaggaaacagataatgccgaaaaataaagacattcataaagttcttgtgattggttccggtccgattattatcggccaggcagcagagtttgattatgcaggtactcaggcgtgccgttctctgaaggaagagggcatggaggttgtacttcttaactccaatccggcaaccattatgacagataaagatattgctgaccgcgtatacattgagcctctgactgtagaggtggtagagcagctgatcctgaaagaaaaaccggacagtgtgcttcctacactgggaggtcaggccggcctgaaccttgcaatggagctggaagaaaaaggctttttcaaggagcataatgtacgtctgatcggtactactgcagaaacgatcaaaaaggcagaggaccgtcaggaatttaaggatactatggagaagatcggtgagccggttgcagcctccaaagtagtaacaacagtggaagacggtattgcatttacaaagactatcggatatccggttgttctccgtcctgcctacactcttggcggcagcggcggcggtattgccaacaacgaatacgaactgagagagattctcgaaaatggtcttcgtctttcccgtgtaggcgaggtccttgtagagcgctgcatcgcaggctggaaagagattgagtatgaagtaatgcgcgacagcgcaggaaactgcattacagtctgcaacatggagaacattgacccggtaggcgttcacacaggcgactctattgtagttgctccttctcagactcttggagacaaagaataccagatgcttcgtacttctgccctgaatattatcacagagctgggaatcactggcggatgtaacgttcagtatgcgcttcatccggagagctttgaatactgcgttatcgaggtaaatccccgtgtaagccgttcttctgctcttgcaagtaaggctaccggttatcccatcgccaaggttgctgcaaagatcgctcttggctatacactggatgagattccaaacgccattacaggaaaaacctatgcaagctttgagccgatgctggactactgtgttgtaaagatcccgcgtctgccatttgacaaatttattactgcaaaaagaactctgacaactcagatgaaagcaaccggagaggttatgagtatctgtcataactttgagggagctctgatgaaagctatccgttctctggagcagcatgtggacagccttatgtcctatgactttaccggacttactgaggatcagctgattgaggagctggctgttgtagatgattgccgtatctggaaaattgcggaagccatccgaagagatatttccaaggaatatattcaccgtattacaaagatcgatcgctggttcattgacaagatcgcaatccttgttgagatggagcaggcgctgaagacccagccactgacaggagagcttcttctggaagcaaaacgcatggaattcccggattatgtgatcggaaatctctgtggcagaacagaggctgagatcaaggctctccgtgagggctacaacatccgcgctgcctataaaatggtagatacctgcgcggcagagtttgcggcagcaacaccatactattattctgtttacggcggaccggatacagaaaatgaagcagtttccacaccggataagaaaaaagttcttgttctcggttcaggtccgatccgtatcggccagggtattgagtttgacttctgctctgtacactgtacctgggcttttgaaaaagaaggctacgagacaattattatcaacaacaatcctgagactgtcagcacagactttgacattgcagacaagctgtatttcgagcctctgacacctgaggatgtagaaaatatcgtaaaaatcgaaaaaccggacggagcggtcgttcagttcggcggacagactgccatcaagctgacagaagcgctgatgaaaatgggcgtgaagattctcggaacatctgcagaagacgtagatgcagcagaggaccgtgagctgtttgacggcatcctggagcagtgccagattccgagaccgaagggagatactgtatttactgctgaggaagcaaaagaagttgctaacagactgggatatccggttctagtacgtccttcctatgttcttggcggacagggaatgcgtattgcagtcagcgatgaggatgtagaagaatacattggaatcattaaccagatcgcgcaggatcatccgatcctggtagataaatacctgatgggcaaagagatcgaggtagacgctgtatgtgacggcgaggacattctgattcctggtatcatggagcatatcgagcgtgcgggaatccactctggtgacagtatttccgtatatccggcacagactatcagtgaaactgcaaaggaaaccattgcagagtacacacgtcgtcttgcaaaagcgcttcacgttgtaggtatgatcaatatccagtttattgtatgcggcgaagaagtgtatgtaatcgaggtaaatccacgttccagccgtactgttccgtatatcagcaaggtaacaggaattccgatcgtgccgttggcaacaaaagtaatcctgggctataagctgaaggatctgggctatgagccgggacttcagcctgaggcaaaacattttgccattaagatgccggtattctcctttgaaaagatccgcggcgcagatatcagccttggacctgagatgaaatccaccggagagtgccttggtattgcagagacctttaacgaggctctttataaagcgtttatcggagcaggaatcaagcttccgaagcaccgcaacatgatcatcactgtaaaagaggaagatcatgaggaagttgttccgatcgcaaaacgttttgaagctcttggctaccgtatttatgctacaagaggaactgcaaaggttctgaaagaaaacggcatcaaggcaatccgtaccaacaagctggagcagcctgcgccaaaccttatggacctgatcctgggacacaagatcgacgttgtaattgatactccgcctcagggggtagagcatcagaaggacggatttgtgatccgcagaaatgccattgagacaggtgtaaatgtactgaccagtcttgatactgcagaggctcttgtaaccagccttgaaaatacagaccttaataatctgactctgatcgatattgcaacgatcgcagacagataaaaacaaatatgaaccggggaggcacagacttctccggtttttatttaccaggaattcagggagtttgaaacggatatgtccgtttggttttgggaaaggaaagtttcgtccgggattatctgcgactgttacattgcagactatttccagcagaatattacctgtgaacagtgttgctttattctttaatgagagtaaaaattgtgttatacttacagtgtccggggtggataaaatctttgtaaaagaagaaaaatgcccggcataaaataaaaatgaaagggagaaagaatggatattattgaatttttaaaagccgtgtttctgggtattgtggaaggtattacggaatggcttcctatcagcagtaccggacatatgattctggtggatgaatttatcaaacttaatgtgacgccggagtttaaagaattctttctggtagtgatccagcttggtgcgatcctggcagtggtggtattatactggggaaagctgtggcctttttatatcagagagcttccaaagaaacaaagagcaatcatagcaaaacagcctgtttttgcaagagggatcatgacttttgtggaacggttctgcgataaggaaaaatgggtgctgtggtttaagatccttgtggcatgtattcctaccattgtgattgcattgccgtttaatgacttcattgaggaaaaatttaacaattacgtggttgtttccattgctctgatcgtttacggtgtgatttttatttttattgaaaactataataaaagacggaaagcaacctgcagatctctggaatccatgagctttaaaactgcttttctgatcggtctgtttcaggttctgtctgtaattcccggaacttcacgctccggttctacgatcatcggaggtattctggtaggaacttcaagaacagtagcggctgaatttacctttttcctggcaattcctgttatgtttggcgccagccttctcaagctgataaaattcggatttgcctttactgccggagaggttctgattcttattacaggcgtggtggttgcatttgttgtatccatactggcgatcaagttcctggtaggatatattaaaaaacatgactttaaagtgtttggatggtacaggatcgtactgggtgtccttgtacttggatattttatcggaaagaatgtaattggataaaaaataagggatatacagggcagaatcctgttacacaggggaaggagcaggatttttgaccggcagctgcagcaggctgcagaaacggaggtacataattatgggaaaatatattatggcaatggatcagggaaccacaagctcccgctgtatcctttttgataaggcgggaaatatctgcagttcagcgcagaaagaatttgcccagtattatccaaagccgggctgggtagagcatgatcctcatgagatctggtcctctcagatggctgtggcaattgaggccatgggaaagatcggggctgatgcgggggatattgcagccattggaattacaaatcagcgtgagacaacaattgtctgggacaaaaaaacaggaaatcctgtttatccggctattgtatggcagtgccgccgtacgtcagacatgatcgaggaactgaaacaggatggttttgctgataagatcagagaaaaaacaggactgattccagacgcttatttttccgccacaaaaattaaatggatcctggattatgtggatggagccagagaggcggcagaaagaggcgaccttctttttggtacggtagacacctggctcatctggaaacttaccaaaggtcaggtacacgttacagattacaccaatgcttcccgtacaatgttatttgatatttataaaagacagtgggacgaagagattctggaatattttaatattccaaaatccatgcttccggaggttaaaccaagcagctgcatttatggctatacaaatgaaaatctgatcggcggttcgattcccatttcaggtgcggcaggcgatcagcagtcagcgcttttcggacagtgctgcttccgtgcaggagatgtgaaaaacacatatggaacaggctgctttcttctgatgcatacaggaaagcaggcagttcgttccgagcacggacttcttacaacaattgcagtgaatccggacggaacaccgggatatgctctggaaggaagtgtgtttgtagccggagctgcgatccagtggctgagagacgaaatgcagattttgaacagcgccccggaatcagaattatattgtctttctgtacctgataccaatggggtttatgtggttcccgcttttacaggactgggagcgccttactgggatcagtatgcccggggagcggttctgggacttactcggggagcgggaaaaactcatctgatcagagcaactgtggagtctctggcttatcaggtgacagatgtgattcatgcaatggaaaaggactccggaatgaagctgagctttctgcgtgtagacggaggtgcaagcgcaaataattttctgatgcagtttcagtcagatcttctggatgcgcaggtagtgcgtccaagctgcattgagacaacagcgcttggagcagcttatatggcaggccttgcagcaggattctggaaggatgcagaggaaatccgccagaactggaagcaggaaagagaattttctccttcggttgaaccggagaagagagaagcccttctgaaaggatggcagaaagcagtacgctgcaccttccagtgggcaaaggacgaatagatatatttgtttggattcagatttatgaatccggaaaggatggtagattcaagtgagaaaatccagaaaaatagtatttgcagtcggtacggcaatggcgttgacgcttgcaggatgcggatcagataaaaaagcagaggaggttgtgcctactgtggctcctacagctactcctaccatacctccggtgacggcaactccggcgcctacgtccacaccggcaccgagaaaaatcggtgaaaaaacctcccagtcaaagtttgtttatcttacaaacaatctgaaaacagatgtaagagaactgtatctcatggtttccggaagcgaagactggggcgacaatctgattccaagagaattttcggtaaaggcatccgatcaggttcagatgttttatacaccggaatctgtacaggcttccgcagaagaggaggattccgaagagaccggcgctccttccggtgcgttgtatgacatgaaacttgtaactgcagatggaaatacctatgaaatctacagtattgagctcagcgatatggaaaaagcatcactgacactggatgaggaaacatcaaccgcatatcttcgctatatgagtctttcagagaaaaaagaaaaagatacaaaggaaaattctcagcagaccggttacggagatgactatgacagtgacgatgaaagttatgatgacagctattccgatgatggaaattatgatgatggaagttccgacgacggaaattacgatgatgggaattatgacgatggaagctccgatgacggtaactatgatgatggaagctccgacgatggaaactctgacgatggaagctccgatgatggtaactatgatgacggaggctccgatgacggaagctctgacgatggaggctctgatgacggaaattatgatgacggaagttccgacagcggaagcggcgatgactatgtagatgccggagatggcgatgacgacggctactatgatacagaagaataatataagtgtgtaaaacgaaaacgctcacctttcggtgagcgttttcgctttacagatataatatttcgccggttcgggaggtgttgcagccgttttgcagccggagggcagtgcggaattccgaagaacggataatttctgcaagagcagaaaaaccgggccggttcagggattccgtttccattacaagaaacataggaagctgctgaagaggaataaaatccaggtattttgacttgaatatgacggattctgctcccaatgcagcatcggcctggctggtcagaactgcgtttgcagtagaaaaatcagaaaccagttctttctggtagccattgatctgatctggcaatattttggcatctttcagtaaaatatccagatacattcgtccggtacttcccttttctctgtttgcgagagcaacatcgggacgtttcagatcactgacggacaatatatttttcggatttcctttttggacataaaatcccagagaatattcataaagaacaaaagctgcaacggacataccgggaagcagggcaggaatatgctcaggaagaataccggcagtggtggcatgaacttttttaaaataaagagaatacagtccgttataagtattcaggtgtgaatgaagtactggaagtccattgggatgaacagccatctggttgatcagatattccagagctggagatgcctgtccgctgataataagaccgttggaatacagaagatagtctcttttcagaagagagctttccggctgaaaaccgggaaaaggcaaaggcgcttcagagacagatgcatcgcctccctgaagataccgattcagctgttcttcactgattcgaagctgtttgcctatttttgaagatcccagttctccacgtttgatgagttcgtagactgtagttttttttattttcagcttgtctgcaatttcctgggcagtgtaaagcttattcatcaattcctaccataacatttgtggctttgataacagcgtaggcatcagatccaacttccaggccaagttcttccacagccgcacaggaaatggtggcaacaataatatttccccctccgatatcaatagagacaatagaatttacagctcctttgttaatgctgacaacttttccttttaactgatttcttgcacttaatttcatgatgatttctcctttatatattattgtaaaaattattgatatctgttatttctgttactgcttacggtattttttaatttttatttcggaaagtaacctgaaatgaaatccggtatgttactgtttgctacattttcagaaatatggttaaaatatttttaaatcctcttcagtaatggtaattgtcctgtatatttggggatattggaaacatacaaaaacgtctggcggaatattgcctgtgtacagttgctgttttacattgagattcatttcattcctggcagtctggttaaagtgttttcccaatcaccttcggtgatggtaattatcctgcataccccggggactctggtaaagaatacaaaacaccttgtgggataataccacatgaacagtaactattttactactatttactataacacagtggaaatgaattgacaataacagtattctgatataaaatgaataaaacagaactaaaataaattaaaatgaataaaggagaagagaaatgaagaaaaaactggcagctattgcgtttgcaggaatgatggcagtcggattaacagcaggaaatgtacaggcggcggaacccagcggagaggtctatgtatttattgcagccagtcttgccaatgcaatggaggatatacaaaaggactttaatcagaagtatccgaatgtggagattttttacaatgcggacagttcaggaactctccagacacagattgaggaaggatccagatgtgatatctttttttcagcagcaaccaagcagatggatgcccttgtagaggagaaactggcaaaggaagagtctgtagtgaatcttctggaaaataaggttgttctgattaagacaaaagatacagaaaccagggttacaggatttgagaatatcacagaggctgagaatcttgccctggcaggggaggatgttcctgtaggacagtatgccagagagatttttaccaaccttgatattatggatcaggtagaggcaatggaaatcaacgagggaaaaaatgtaacagaggttctggcagcagtgacccagggaagcaacgaggtaggggttgtatatgcaacagatgcagcttccgtggcagatcaggtagaaatcattgcagaggcttcatcagacatgcttgaaacaccggttctttacccggtaggcatgatagaggatgaagaggctttaccagaggaaaaagtggcagcaaagacattttttgagtatcttcagacagaaaacgcactgaaagtttttgaagagcatggattcagtccttatactgctgaagtggaagagaacgacacagaggaagcggaagatacacaggcagatcagaaaactgactcagaagcagaagaaaccggggaagcttccactgagcaggagaaaacagcagagtgacatagaaataagaatttgccaaagctctgtacattggagaatgaatgatgagtgagtttatacaggagattaactggtctcctttatggatttccttgaaaacaggcgcggtggctactaccatcgcgttctttctgggaatctggtgcgccagaaaaataatgaaaatgaagcctgtgaccagagcagtatttgatggtattctgacaatgcctcttgtgctgcctcctacagttgcaggtttttttctgctgattattttcagcctgcggagaccatttggaaagtttctcctggagaattttgattttaagatcgtgcagacatggaaagggtgcattgtagcggctgctgtaatagcgtttcctctgatgtaccgtaatgcccgagcagcttttgagcaggtagacgtaaacctgatctatgcaggacagacccttggaatgagcgatcggaaaatattctggaaagttattattccggcagctgctccgggcattgtatccggtacagttcttgcgtttgccagagcaatcggggaatacggcgcaacctccatgcttgcaggaaatattctgggaaaaacaagaaccgtttctgttgcaattgcggcggagactgcggcgggaaattatgatgtagcaggattctgggttgtgattattgtgcttatttctttttttattgtgtcattgatcaatattgtgtcaggaagaggaatgaaaagcagacggtggatataaaaagtaaatggtttgtatatgaatacaaaaccatcagtgagaaaatactgaatgatgcataatggaagcggtaatatgaggatataaaagaaatgtcgggctttctatgtgtattatatacaaacagagaagagttctttatgttttttgtggctgtttacggtacgaaggaagaaaaacaagaatcaatacctgaatatataagaaaacatattcaaggtttataaaaacaactgtcaggggaaagtgagacggaaggaaaatatgtccataagtgtaaatatagaaaaaagcttcagaggctttactctgaaagtacaatttgaaactacagatttatctacaggaattctgggagcctcaggaagcggtaaaagtatgactctgcgctgcattgcaggtattgagaaaccggacagaggaaagattgtgattcatggaaaaacggtttttgattcagaagaaaaaatcaatctgaaaccacaggaacgccaggtaggatatcttttccagaattatgcgctttttccgacaatgacagttcgtgacaacattcgttgtggatttcggggcgaaaaaaaacttcgagacgaaaaagtacaggattttatctgtcgctatcatctggaggggttggaaaatcggtatccttctcagttatccggagggcagcagcagagagttgccctggccagaatgatgataggggagcctgaggtcattcttctggacgagcctttttctgctctggatggatttttaaaagacgttcttcaaaaagacatgcaggatttcctgaaggaatatacgggagatatgattatggtcactcacagcagagatgaagcttttcgattctgcaggaacctgatgcttttaaaagagggaaaaactctgatatttggagatacccggaagctttttgagcagccggagcttctggaagcagcaagacttaccgggtgcaaaaatcattccaggatcgaacgtctgggagattatgaactgtttgctctggactggggcgttgctcttcgtacagagaaaaaaatagactccgatatcactcatgtggcaatccgtggacattggatgcagggaacggatcacaaaacagaaaactgtattttgtttcaggtagcggactatgtggaaacgacctttgaacatcagtatctggtaaaaagcccggagatggaagaagatgcagttctctggtggatgcgccctaagggcagttttgacgagccggcagaaaaaaatctgcccaggtatctgtatcttccgccagagcatttaatgctgctgaaatagaaaagtgtttttatgatgtttttctttataagtacaggggattgatttataataaaattgtggcgataaatgagcaaatatataattttgcataatggatccgcaatatgaagaaataaaaaatttaaactttatatgtgcatttcacaaagcaacgataattttgtgtacttcttcaagtttgctcatttatagattataattattaatcatttaacatgataaggagggaaaacaaagaccagcaccatttccacagaagataaggattccgggagtttccggaataaaatatacaggctgataacatttcttaaaatacataagacaaaacccgaaagctgataatataagttacataaagaaaggaatgtcttatggaaagcagtactatttttgatgatgtgttccggactatgttggaaaagatgccgcagctggcagtgccgctgatcaatgaagtttttggcacttcctatccggaggatgttaaaatcatacaaaagagaaatgaacatcagacacaaaacggcagggtgatcacagattcccatttgctgattgcaaatcggatttaccatatagaatgtcagagtacagacgattctactatggtgatccgaatgattgaatatgattttgcaatcagtctggaacaggtacagaaggaaaatggcagatatcggatgtattttccgcagtcctgcgtattgtatttgcggggcataaaaaagagggatacgatatctgtagagattgtgatgccaaatggtaatacagtggaatacacggttcctgttgtacaggtgcagaggtttacctgtgatgatatgctgcagaagcatttgctgtttttgctgccgtaccatgtaataaaatacgaacaggaaaaggaactggacacggacagcgaaaaatggaaggaacttttagatgagtatgcaaaaatcgagaagtatctggagaaaaattttcttgagaaaggaaatgaaaaagcataccgggatatggttgagctgatcatccggattgcagattatgtgttcagagacaaagaaaaagtaaagaaaggatttggtgatgtaatgggcggaaaggtattggaactggaatcagataagctgattcagcggggaattgaacaggggctggaaaagggaatccaacagggcattgccatggaacgaaaaaacacagagcttgcacgtcgcaaggtggaggcggcagaggaggagattcaacgtttgaagaagcttttggaagaacaaaataataaatagtgactgtgagaagcacaacaaagaattcaggccggagcatcagctccggccgtttttatgataagttacatacccgcttaccagcatggccagcttaaaggtcagggcatcctcaaaggtacggagatccagcccgaactttttctggattttctcaaagcggtacacaagagtgttccggtggacataaagctgtctggaggtttcggaaagattcaggttgttctcaaagaaggtacggatgatggcaagggtttcactgtccagggaatccagagattcactgccaaatacctcctggataaacatttcgcacacagaaaccgggagctgatagatcagcctgccaattccaagcttgcgatagctgaaaacatttttttctgagtaaaagatctttccgatttccatagctgtttttgcttctttgtaggcattggaaagctggaggagatcatcggctgtgttgctgtaggaaacccaggcctgggtcatggcttcagttccaagcatgtctaccagcataaaagcaatatcttccatatcctcgtctgattctgtagaggaaagctcccggattacaatgattccggaatcgtctacagaggtaataaaatcttttgtacgggcggaaaagatattccggatagtggcaagagcgtgttcgtctctggcctggcgggtttccaccagaaaaactgcccgtctggcagtggaagagatatggagctttttggcgcggttaaaggcttctacgtcctgataatttcccagaagaagtttttgcataaaagtgtttttgtcatttttttctgcataggcttccagaagactctgtacctggcagacagccagttctccaatggtgggaacactgtctccgcttccccacacaataaggatataggccagctcttctttatacaggactttataaagacagcggctggtgtttgccatgataagagcattgctttccctgaattcactgagctttttttctgaaggaagtgaacgggagcaggtagttacaaaaacttcgttttcatcattgataagacaaaaatcaagattgctgatggttttccagtcatccatatatttctgtaaggttcgctgtattgacatgagatcatccctctttctactgtagttataaatgaaacaaagccggctcctgtattttatctgccgggaaagtagtaaattctgtaccggactttctggtaaagaatattgcagcctgtatcatagctgaaatttcctgtaatataaaatgctttgcacaggattcagtgacaaagcaggttactgtaaacagagtgaacagtaaccaaagctgtggattatcttgaaaatccggaagattcatcctctgccgggctatgaggcgctggtccggtggaatttcgttcaatcagctgagcgtgaagataaatggttccgatagaaactttgttcataatactgtctatggcataaaaaccacatttgccaagctcgatccggtcctggcggatggtagtcagaggcggagaagtataggcgcacagaggcagatcgtcaaaaccgataatactgatatctcccgggacccggtatcccagctgctgacactgaaccatagcggcgttggcaatctggtcgtggctgcagataatggcagtcattcccatattcagaagtcggggcagatgcttttcaatacactgggttacatagtaagaagcgcctgcgtaatcgggatcagccttcagcccgttctgtttcagcgcatggaaaaacgccttgtggcgcacctgcataatataagcaccaagtgcgctgcttaaatatccgatctttcggtgcccaagtttttttaagtgagatacagcaagagccattccttcattattgtcaattccgatagaagcgataaagggattggcgggaatatagttgtcataaagaacagttggagtgtggcttgttttaaaatcctccatccagggatcgttcagagaaaaccccaggacaaaggcgccagcataatcattctggagcataaaaacatcatagggagtttttttctgaagctttgctgttacaggaaccacatttactacatatcctgcaggttctgccatctgccggaagccgatcacaaaatcatatccgaactgatgaggttcttcatattccatattttcgattaggatgcagaaacgttttgcatcatttttttgccgccgcagtctggtatatcccatttctactgcagtatcaagcactgtttttcgtaaagtttcgcttatatcgggagcattgttgattgctttggacacagttcccttggaaacgccaagtctgtcagcgatatcctgtattgttgccatatgtgtaccttccttttgccagacatatctgagataaaagagcagccgtgtaaatccgaaaagacagagccttaaaagcagaatagtgactgtataaacagtttgcttttaatcctgcctgtttattcggaaactgcggattgtacttaaaaacagttcaaatgtctggattctttgactttaattatatcgaaacatgaggaaaaatgcaattcttttgatcttacttatttcgaaaagtatatcagcgaacagagaaattataaaaaatgcacaaaaataacaatataaaaatgtgaaaaacagagaaaagcatctgatatattgacgtttttttcggggtgttgtatattacaagtaacgaaacataacgaaacacaaggagaaaagaaaaatgggaaggagaagaacagtgcttctgatggtcggagttcttgctgcagtcagtcttgcaggctgcggaggagcttcaggagaaaagaccggagcaaaggaaaaggtacgtcttatggtatggtctccttctgaggatcagtccaaagacagcggccagtggctccagaacagctgtgaggactttgcggagcttcatccggaatgggacatcacgtttgtgtatggaattgctgacgaggcaacagcggcaaatcaggtggcacaggatccggaggcaagcgcagatgtatttatgtatgccaacgatacactgacaattatgacagacgccaatgcactggcgaaatttggtggaaagtacagagaagagatcgaaacaaccaactctccggaggttctggaatctctggtaaaggatggagatctttacggtgttccgtttaccacaaatacctggtttatgtattatgataagagtgttttctctgaggaggatattaaaaatctggataccatgctggagaagggaacggtttctcttccatttaccaattcctggtatcttccgtctttctacattggaaacggctgtactctcttcggagatggaacagatgaatcccagggggtggattttggcggagaaaaagcggcagaggtaacggactatctgatcgatctggctgcaaatccgaattttgaaattgatgcagacggttccggtcttgcaggacttcgtgacggaagcatcaacgctatcttctccggttcctgggacgccaatgccgtaaaggaagcccttggcgaaaatatgggcgccgcggctcttccgacttataccttgaatggtcagaaaaaacagatgacagcttatgccggatccaaggcgattggcgtgaacccttacagtaaaaatatggtagcggcagtagagcttgccgtttatctgggctctgcagatgcacagagaacacattacgaactgagaaatgtgatcccctgtaacacagagcttcttgaagaagaagccattgctgcagattcgcttgtttctgcgcagaacgacacctttaaccggacttccattcttcagccttttgtggctaagatgaacaactgctgggttccggtggaaaatatgggaaaaggtatccggaacggaagcgtgacccatgaaaattctctgcagcagacagaggatatgaatgaggcgatgaacagcgacggtatttaaaagaaggggacaggaaaatgttgaaattaaagaaaacaaaagacgaattttccacaccatatacctgtatgaacgccattaaaaaaggcgggattgagacaaaactttccatggtactgatgggatttggaaactttgtgcacaaacaaaagatcaaaggtcttttatatctggcaatagaagctgcgtatcttgtatttatgctggtgaacggcatcggattcctgagtatgctgggctctctgggaagtgttccccagaaagaggtctgggatgaggcaaatcaggtttatgtgtacacacagggcgatcagtcagtactgatcctgctctacggagtggcaacggtctttctgacactgcttatgatctgggtttggagaggtactcttaaaagcgcttacaaagcagaatgtctggacaaaaacggacagcatgtgaatacttttgcagaagatctgaaatctctgcttcatgagaatcctcacagacttctgatgactccgcctgtggcagctatttatatttttacgatcctgccgctgatctttatgatctgtatggcgtttaccaattacagtaagatcggaaatcacctgatgctttttgactgggtaggactggaaaactttaaggcgctgtttgattccaacagtattctgggaagcaccttttggtcagttcttggatggaccctggtgtgggcgttctttgcaacctttagtaactacattttcggtatgatccttgctatggtgatcaaccgtaaggatacaaaagccaagggattctggagattttgcttcgtactttcctgtgcggttcccatgtttgtctctcttcttattatgagaaccatgcttcagccaaacggcgcggtaaacgtacttttaagaaatctgggatggatcggggcagacgcaagccttccgttctttacagatccaacatgggcgagagtgactgtaattgttattaatatctgggttggtgttccctatacactgctccagcttaccggtgttctgcagaatattccggaggagctttatgaagcggcaaaggtggacggagccaatgcgatacagagatttttcaggatcacacttccgtatatgctgtatgtgacaactccgtatctgatcgtgacctttaccggaaacgtaaataattttaatattatttatcttctttctggaggagatccggttacggatctggcgtccacagccggaaaaacagacctgcttgttacctggctctataagcttaccattgataaacagtactataatatcggagcagtgatcggaattctgacctttattattctggcggtgggagcgcttcttacttaccgcaacagcaagtcctataaagaaggaggaatttaaagatggcagcagcaaaatataagtcagcaaaaacaaagcgttttgtaaacaataccattgtacatgtaagtctggcaattctggcctttatctgggtattccctattgtctgggttgtgctcacaagcttccgtgcagaaaagggctcttatgtttctacgtttctgccccggtcttatacactggataactatattaaactgtttaccgatacatcgattctgaacttccccaggatgttcatgaataccctgattattgcaattttttcctgcctgatcgcaaccttttatacactggcagtttcctactgtctgtcaagactgaaatttaagctgagaaagccatacatgaatatggcaatgatactgggactttttccgggatttatgtccatggtggctgtgtactttatcttaaaggctgcaggactgacagaaggaaatcttatcagggtagcgttgatcctctgttattcaggcggcgcaggactgggcttccagatcgccaagggattttttgataccattccctatgcagtggatgaggctgctattctggacggctgtaccaaatggcaggtatttacaaaagtaactttgccgttaagtaagccgatcattgtttatacagtacttacagcgtttatggctccatggctggactccatctttgcaaaagttatctgccgtgcaaactcagaccagtataccattgccattggtctctggaagatgctggaaaaagaatatattgacagctggtatacaagctttgcggcaggggctgttctgatttccataccgattgcgattcttttcctgtgtatgcagaaatattatgtagatggagtatccggcgcagttaagggttaatgaaaaaggagaattatgaggacgagacaggaattaaagagactatatcattcttcagaatttcagaaaaaatatttgtatgagggcagtgacctgggggctgtctgcacagaggaagggacctccttccttctgtggagccctctggcggagaacgtgaagcttcgtttttataaagacggggaaaaagcttcctgtcatcaggtcgtttccatggaaaaagaagaaaaaggtgtctgggcataccgcaccggggaaagcctccacggagtttactatgattatgaactcacatttgacggcgaaaaaacagttaccggggatccttatgcaagggcatgtggggtaaacgggaaccgcagcatggtatgtaacctgaaaaaaacagatccacaggtctgggatgaggataaacgaccggagccgtcccctgaaaatgtgatctatgagcttcatgtaaaggagttttcctgggatgcttccggtggctttaaaaaggaaaaccgtggaaaatacagagcctttacagaagagcataccacacttcacgggaacggtgtgcatcctaccggacttgattatctgaaagagcttggagttactcatgtgcagatcatgcctgcatatgattacggctctgtagatgaaaaaagtgaaacagactttaactggggctatgatccggtgaattacaatgtgccggaggggtcctattccacagatccggaacatggggaagtgcgtatccgggaatttaaggaaatgatccaggcccttcacagaaatggttttcgtgtgattatggatgtggtttacaatcatatgtattcactggataataacctgaatcgtacagtgccctggtattatttccgcacagacaaaaacggagagatttccaatggctctgcctgtggaaacgatgtggcaagcgagcgtcctatgtgcgccagatatattctggattcggtgctttactgggtaagggaatatcatattgacggattccgcttcgaccttatgggacttcttgacgtggagcttatgaaccgcatccgaagagaactcgatactgtttacggagagggagaaatcctgatctacggcgaaccatgggcggctgatgtgacagccatggaggacggcgcggctccggctctgaaaagcaatatacagcttcttgacaaaaatgtaggtatgttctgcgatgatacaagagacgccattaaggggcatgtgtttgaggcggaaacaccgggctttgtcaacggggcagagggcatggaggataaaatcctgaacagtgtaactgcctggtgcggaaatgacagtgtaaagaccccaagccagatcattacctatgtgtccgctcacgacaactggacgctttgggataagcttgaaaaaaccatttccgatgaaaaacagcgggaaaaagtgaaccggctggcagcagcaatttatatgacctgtcagggaaatcttttttttctttccggcgaggaatttgccagaacaaaggacggatatgagaatacctacaacgcgcccatagagctgaacagactagactgggaacgggcttatgaatatcaggagttaagacagtactatcagggactgatcgctcttcggaaacagctccccggcctctgtgacaaatcagaggaggcgcggaaaaggatttccgggcagtggaaagaagacggcgcagttggatttctggtggataaccgggacgaagcaaagacatccccctggaaaaagcttctgatcatttataacagaacagaaaaaacagtaacaagagagcttccggaaggaaactgggaaattcttctgaatggagaaaacagttttctctggaaggaaccaaaaaatacacaaaaggcagaggctgcgccggtaagcgcgctgatcctgggacagaggtaaggatatgaagtggatttacggaaaacaggagctgaaaaatctggaaagaggacaggaaaactgttatcttcttaccaatggcctgggtggattttcttctctgaccatgacaggttctgtatcaagaaacgatcacgcccttctgatggcatgtgtgcaggctcccaaccacagatacaatatggtgcatcgtctgaaggaaagtctgtgttttggtaaagaggagattgttctctcttcccaggagtttgcagacggacaaaaagaagagggctgtccttatctttcctcttttgtatttgacgatatgcccatatggagattccttgttcatggagtggagatccgcagggaaattgccatgaagcagggggaaaacacagtggcagtccgctacagtatcagaaaccgcagtggaaaaacagcggaactgaaagtgatgcccttttatcagtttaccccaaagggcagtgagccggaaccagagcaaaagtttcagtatacgaaaaatgcagtgatttccaatggaatgactctctatttccagacaaatggaacactggataatatagaagaaatacaggaaacatatttttacagctatgacgcctgtgacggacgaagggagaccggtcttgcaaagtccggacacataatcacagaaagcgttcagccgggagaggaaaaaatcctgaagcttgtatactccatggaaaatgcagatcaggatgcagacgttatcattctggaaatgcagacttaccgcaaagctctggaagcaaaggcgggacttcataaggaaatggcaaaagagctggtaaaaagcgccagccagtttgtttccagaagggaatctaccaacggaagaaccattcttgcaggttatccgttttttgaggactggggaagagataccatgattgctcttccgggcgtgtgcatttccacaggacagtatgaaacagccaaggagattctcagaacctttgcagttcatgaacggagagggctgatgccgaatctttttccggagggcggaaacgaccccctttataatacggtggatgcggcgcttttgtttatcaactgtgtgtatctttattatcaggctgccggggacagagcttttgtgcaggaaatgtatccggtgatggagcggatcataaaggcttaccgggagggaaccgactatggaatccatatggatgaggatggtctgatccagtcaggggatgggctgtggcaggtaacctggatggacgtgcgggtaggagatattcttcccacgccccgtcacggcaagcctgtggaaatcaatgcttactggtataacgcgttgtgtattatggatgagcttgcagagacagcagataaaaaggcagtttatacacagctaaaagagaaagtaaaagcttcttttgtggataagttctggatggatgacaaaaaatgtttaaaagatcttgtttccggaacaaaggcagatgctcagatacggtgcaatcagatctgggcagtatccctgacctttaccatgctggacccggaaaaagaacagcaggtagtggaaactgtttttgaaaagctttacactccatatggaattcgtaccctggaacaggaagatcaggaatttcatggactttatcaggggaaaatggaggacagggacatggcctatcatcagggaaccgtttggacgttccctctgggagcttattatcttgcatatctgaaggtgaatcagtacagcccggaagcaaagggaatcgtgagagagcagcttgaggttatggaagcagccgtgagagagggctgtatcggacagcttccggaaatctatgacggcgaaaacccaacaaggtcaaagggatgctttgcccaggcatggagcgtgggagagatcctgagagtttatgaagtactggaaaaattctgaaacagaaagtgtggaagagaggagacagttatggagaaattattagagcaggtattacaggaaagataccacagaacaattaaagaggcttcaagtcaggagatttacacagcacttcttctgattatcaagaataaaatgaagaacatgaaacgcaacgaaggaaagaaaaagctgtactatatttcagcagaatttctgattggcaagcttctttccaataatctgattaaccttgggctgtttgaggaaacaagagaggttctggaaaagaacggccatcatatcacagatatcgaggagatcgagcaggagccttctcttggaaacggcggtctcggacgtctggcagcatgctttctggattccattgcaactctgggcctgaacggtgacggcgtgggcttaaattaccatgacggtctgttccgccagacctttgtggatcacaaacagaaggaagaaaaaaatccatggatcacagaggattcctggcttacaagaacagagacaacgttccaggttccttttaaggattttaccctgacctctgttatgtatgacattgacattccgggctataaaaacaactgcaaccgtcttcatctttttgatacagacactgtggatgaaagtatcatcggcgacggtatcagctttgacaaaaacgatatcaaaaagaacctgaccctgttcctttatccggatgacagtgatgaggcaggccagcttcttcgtatttaccagcagtattttatggccagcaatgccgcgcagctgatcctgaaagaagcagaggacaacggttacgatctctacagactctacgaccacgtggcaattcagatcaacgatactcaccccaccatggtgatcccggagctgatccgtcttcttatggaaaaaggctttaacatggatactgccattgatgttgtgagaaagacctgcgcttataccaatcataccattcttgcagaggctctggaaaaatggccggttgcatatcttgaaaaggtggttcctcatcttatgcctgtgatccgtgaactggatgcccgtgtaaaaaaagattacagtgatgagcgtgttgctattatagataaggatgaccgtgtgcatatggcgcatattgatattcattacggatatgcggtaaacggtgtggctgcccttcatacagagatcctgaaggaatctgagctgaaaccattctacgatatttatccggaaaaattcaacaataaaacaaacggaatcaccttccgcagatggctgaagcactgtaatcatgatctggcggcttatctggaagagctgatcggcggggaatatcttgaggatgccacaaagcttgaaaagcttctggactataaagatgatgagactgtactgaaaaaactctgtcagatcaaaatgcattccaaggaagagctgagagattatctgaaaatgactcagaatgtggagatcgacccaaacgcgatttttgatatccagatcaagcgtctccatgagtataagagacagcagatgaacgcactttatgcaatttataaatataaggagatcaaaaaaggaaatcttccgaaacgtccgctgacaatgatcttcggggcaaaggcagctccggcgtataccattgccaaggatatcattcatctgatcctgtgcctgcaggagctgatcgaaaaggatcctgatgtaaataaatacatgaagatcgttatggtggaaaactacaatgtaaccaaggcagaaaagctgatccctgcctgcgatatttccgagcagatctctcttgcttccaaggaggcctcaggaaccggaaatatgaagtttatgctgaacggcgcagtgactctgggaacagaggatggggcaaatgtggagatccatcagcttgtcggagacgagaatatttatattttcggaaaacgttctgaggatgtgatccgtctttacgaagaggaaacctacagcgcggagactctgtatcaggaagatgaaatgatccgtgagctggttgagtttattaagggagaagagctggaagctatcggagatatggaaaatctggaaagactgtataaagaaatccgctccaaagactggtttatggctcttctggatgtaaaagaatatattgaaacaaaagaaaaaatgctggcagattatgaggacgaggcagcatggtcaagaaaagctctggtaaacattgcaaaggccggatacttttctgcggaccgtaccattgccgagtacaatcgtgatatctggaagctgtcataaagaggtatattatgaaagaatcaggaattttgatgccggtgtcagctcttccctccagtacaggagtgggagagctgggagctgacacctttcggtttattaaaaatctgaaacattcaggagtaaagatatggcagatacttcccctgaatcctgcaggctatggaaactctccgtatcagccttattcctcctgtgcgggagatgaaatctacatcagtctggaagagctgtataagcagggacttctgaaagttttgcctgaggcttttcgcaaaaatgcggcaaaggtggactatcaggcggtgagagaatggaaggagccttatctccgggaagcctgcagcaattttcaggaaacagaggattatcaggggtttgtggagcagccctgggtaaaaaactacggaatgttccgcgccttaaaaaaggaaaacggaaaccgctgctggaatgagtggaaagatgaggataagagctggccggaaacaggggcagaggttccggatcatataaaggaagaggtttactaccagatgttccttcagtatgttttttactgtcagtggatggcagtaaaaaaagctgccaatgacgctgggatccggattatgggagacgtgcccttttatgtgggagtggactctgtggatgtgtgggcaggtaaggacaacttccttctggatacagacggccgtcccatctttattgcaggagttccgcctgactatttcagcgccacaggacagagatggggaaatcccatttatgactgggattatctcaaaaaaaatgattatcagttctggcttgaccggatcgggtacagcagcagattgtttgatatgatccgtattgatcatttccgggcttttgacaccttttggaaaattccggcaacctgtcccacagccattgaaggggaatggatcgaggctcccggttacgaagttctggacatgcttaccgaaaagcttccggatgtggaactgatcgcagaggatctgggagatctccggccggaggttcttaccttaaaagaacattatcatctgaagggaatgaaggttctggaatttgtccttgatatttcaggtaaatatgcggcagacagctttccggatgaggaaaacatgatcatctataccggaacccacgataacagtacactgagggaatggtatcaggagcttagtgttccggccagaagaaagctccgccgtttcctgaaaaaacagggcatcaaaaacggttctgtacaggacaggcttctggaatatacctggagaagcaaagcagagtacgcaattgttcctctttctgatattcttggaatgggaaaagaagcacgactgaacactccgggtactgtgggaagtccaaactgggaatggaggatgccggacggggacaggatagaagcaggtcttaaaaaatatgcaggacatttatcatctataaatctatagaaagaataagcgtacaaccatcatttctggtggtcatacgcttattatacgaggaaataacatatggaatttaccggggtttatcataaaacttcagagcagatgagctatccgtacaatgaaaaccagctgatcgtgaacataaaaaccggttatgatgtcaaacgggtcttcatacattatggagacccgtttgatgcaggtattctgggcggaaaagaaaaatggacagggaaacgggaagaaatctgctacaaaaagcggctgaagcatcagctctggtggacgaccacccttgcgccgctatataaaagatgcaaatattattttgagcttcagacagacaaggaaacctggtattattttgaggacggttttcttacagaggagcagcttcatatggatggaagaatgctccagtgttttattgttccctggatgaatccggcagatctgaacatgacgccggactgggtgaacaatgctatatggtaccagatttttcctgacaggttctgcaatggaacaccggagaaaaatacagaggatattcttccctggagaaccggaccggttaccaacagagaacggtatggaggaaatctttccggaatccgtcagaagctggattatctgaaagagctggggatcaatggaatttatctgaatcccattatggaggcagaatccaatcacaaatacgatacaacagattatgaaaagatcgatccggtctttggagatgagaaggagttctctcttctggtaaaggaagctcacgatcacggcatccgtgtgatggtggacgcagtatttaaccattgcgggccaaaatttgctccctggatggacgtgcaggaaaatggacgggcttctgaatatgcagactggtttatgatcaatgactggagtgaccttaagaaaaaggcagataccagggatggacgattttattcctttgcctttgcggatggaatgccaaagctgaataccaataacgaaaaagtgcaggagtatttctgtaatctctgtgaaagctggatccgtgactatgacattgacggcatccgctttgatgttggaaatgagatttcccacagctttctcaaaaaaatgagagagcgggtaaaaaggctgaagccggatatttatcttcttggcgagatctggcatgacgcaagccagtggcttatgggagacgagtatgattctgttatgaattatcctctgatgagcggcatccatgacttttttattgataaggcaatgacaaaacaggactttgaatatatggtcgatcactgttatactatgtacatgcagcagtgcaacaatgtactttttaatcttctggattcccatgatacggagagactgatgaaccgttttcatgatctggatatgttttatcagcagcttgcagtgttgtttaccatgccgggaagcccctgtatttactatggaacagaaattgcaatggagggcggccacgatccggactgcagacgctgtatgccctggcaggaactggattcagaggaaaacagacagcgtatagcagaaatgaaaaagctgatttccctgagaaagcaggagccttcttttaaaagcctgtactttcattttccgggaaattatcaggagaagcgctgcgtggaatatattaagctggatgaacagaatcagaaaattgaagtgctgctgaactgttcagaggattccataaaagtggaagaacagggagaaatcctttttgcccggggctatatgaatggaagccttgcaaaaaacggaactctcatacgaaggatttaacaggaggaaatggatatgaacaataaaaaatggtggcagaattctgtggtttaccagatttatccccgaagctttcaggacagtaacggagacgggatcggcgacatccagggaattataaaaagactggactatcttcaggagcttggcattgacgccatctggctgtctccggtgtgtaaatctccccaggatgacaacggttatgatatttccgattatcaggatattgaccccatgttcggaaatcttgatgacatggagcagctgatctctgaggcaaaaaagagaaatatccgtattattatggatctggtgctgaatcattcctctgatgaacaccgttggtttactgaggcaaaaaaaagcaaggacaatccttatcatgattactatgtatggcgcgatggtgaagagggcgtttatccaaatgatatgggatctgtattcggcggcccggcctgggagtgggtgcctgagttaaagcagtattattttcatcagttttccgtgaagcagccggatctgaactgggaaaatcctaaggtcagaagagaaatctatgatatgatcctctggtggatggacaaaggtgttggcggcttccgtctggacgtgatcgaccagattgccaaggagccggatcttaagattactaataacggaccgagacttcacgagtttattcaggaattaagcagagaaaccttccagaaaggagatctgatcacagttggagaggcctggggagcagatattgacagggcaaagctttacagtaagccggacggaagcgagttttccatggtgttccagtttgagcatatgatgctggatcaggaaccgggaaaagaaaaatgggatttctgtcccctgccttttgtgaagctgaagaaatgcctggaaaaatggcagaaggagcttcacggctgcggatggaacagccttttctgggataatcacgaccttccgagaatcgtatcccgctggggcaatgacagagaatacagagtggaatctgcaaaaatgctggcaactgttcttcatggaatggaaggaactccctatgtgtatcagggagaggagctgggtatgacaaatgtgcgttttgattccattgaacagtatcaggatatcgagatccgaaatatgtacagggagcgtctggaaaagggctatgcagagaaggatattatggaatccatctatgcaaagggccgtgacaatgccagaactcccatgcagtgggatgatacagaaaacgcaggatttacaacaggagctccatggctgggtgtgaatcccaactatacagaaataaatgcccgaagccagcttcaggatgagaactctgtttttcattattataaaaagctgattcatctccgcaaagaaaacagcatttttgttgatggcgattttaccctgctgctgccggaagacgaaaatatttttgcttatgtgcgggaatatgagggcaggaaactgctggtggcagccaattttacagataaagaggtggagtgtccgctgttaaaggagtggggagtgcctgcagacgaggatggcgccgctaagagccgggacaatggagtgaagcttttgattcacaactacaataatctgccttcccagcagaagctgagaccctatgaagcgatgatatgggagaaagcagagacaggaactgagatctgatttatggaaaaatggttgttattatgttggcagaaataccaatggcaaacctttcgcccgaatgttttttatgaatcctggctgtttatctgacaggatagacaccggaagtttcgggaaagcaggcagaaatataaaggctcaaaatgcagtaatagggcaggattctaagaatcctacccccaaacttgacacagagcccaaatataaagctgatattgacaggctgcagacaaatagtttattttgatttttgataaggagcctaaaaaacacccccggaaatcttccgggggtgaaatcatatcaggattagtttgtgataacaagttcagtttctttgtcaaagaagtgagctttgtccatatcaaagtcgaagctgatcggatcgccggttttagctgttgtacgaggatcaacacgagctgtgatctgagttccgtttacatcgaagtacaggaatacttctgctccgagaagctcgtatactttaacgatagaggacatggaaccgttagcggaatctgcaacgtcctcaggacggatacccataacaactgttttgcctacatagcctttatctttgagaacttttgctttttctgccggaataacaacctcgtcattgccgatcttagcaaccagatcagaaccgttttctttgatctcagcgtcaaggaagttcatctgcggagatcccatgaatcctgctacgaacaggttgcctggtttctgatacaggttctgaggtgtatctacctgctgaacaacaccatctttcataacaacgattctggtaccaagagtcatagcctctgtctggtcatgtgttacatagatgatagtagcgcccagtctctgatggatcttggagatctcaatacgcatctgtacacgaagctttgcatccaggttggaaagaggctcgtccataaggaataccttaggattacgaacgattgcacgacccatggcaacacgctgtctctgaccaccggaaagagctttcggtttacggtcaagaagtttctcaaggtcaaggattcttgcagcttcacgaacctgtttgtcaatctgatccttcggaaccttgcggagcttcagaccaaatgccatattatcataaacagtcatgtgaggatacagagcgtagttctggaataccattgcgatatcacgatccttcggctctacatcattcataactttgtcgccgattttaagagtaccgccagaaatctcctcaagacctgcgatcatacgaagagttgtggattttccacatccggatggtcctacaaagatgataaattctttatcttcaatttcaaggttaaaatccttaacagcctcaaagccgttcggataggttttgttaatgtgctctaatgataaacttgccattttaatttccctccaggtaatatttgtaaaatatagttttgctcttgtttcgaactgtacttagtataacgaaaagctataaaatgtaccagagaagaatcctacaaatatttcagaggtttgttgacagattgacgaaaagaacagaaagatcagtcattttgctacaccatttccatctgtattctgcgttcgttcaggaacattccctgaagcgcttttgcgtggaagcgtctctggaacaggtcgcatttgcagagaaacagatagtagacattcaggccgcagtcgttcatggtttcaaaattaccctggccttttgcaagaatcacatctgcctgtttcagaagcgtccgggcttcattgctgagtccagggaaccaggttccgcctacgttgcttccgtttccagttacttttacaatatcagtaagtccgatttcttcagcatcttccatggttgcatcattgacaacaggatatccccgtacaatgacggtaatattcagctggggatatttttctttcaaaattttaacggcaagtttatcaagaacaatttctccgcagttatcagtaagataaacaagagttttagctgtggagagatctttttggaagttggcgtattccgtctggctcagaggttcctgattttcattttccagaagcttaagcattgtttcctgacttacattttccaaagctgcaaaatcaatatagtttccaatgcgggcatagagaagcgctgtttccagagggtctgcggaagtacggattttttcctcaacagaagcttccacattcagcataagctggttgaattctttttttatttccgtgtaatcttcagcaggacaattccagaattcgctgtagagccttttgacctcaacagaaaggctgggagagcagtcctgttctttggcactggaaagaattgacatgacctttttcatatattcggttttcttatccatgtctggaaatttccggattttttcttcctgtttatttactgcacagcacatgcaatagggatttaatttcatttgtagtcctttccgcccggattcaggggccagtttgataaaaatattataggacacagggagaaaccgggcaagagggagatggtgaatttcataaaagcttacagggaggaactgaataagaagcttcagagagacagctttataagaatttacagaaagacaaatgaataagaaactatagtgagatgacgctgcaatatttataagaatctacggaaagacaatggaatcataatccacagacagaaagcattctatgagtatccagtgtgacagacacagaagctacatgatgcagaaacagctcaggaatcacctgggaaaacagatgctcccgggcaattctttcctgtatattcggtggtggttaaataacaggcatgataattcaggcttttatactgcgcctgcgttgataccgggccagaagatcttcttccctgaaatctcccggattatcggaaacgtcactgtgatacaggatccagtcacttacattctccataaaccagccttgttttttgagagaatttatgatctgacaaaagctgccatgtgtctgaccggtctcgttatcacagtagaccagggcattggtttcatcggaaattctctggaatctcatacgggaaaaggcattgttcagtgtggaataaatactttccgaattatatttctgttccgtttctattttatgattatccatacgaatcagcattttcagcataacatcgcctcctgttgtagttgatttcagcaaagaaaaatctcctgttttgcgcaaaacgggatgttatgatgtctgcagaggatcaagcatgattacctttactgcctgtaaaaagtatagcatctaaagaaggggacaacaagaaaaatcgttcgacaaattctttgattttatgcagtttcagggaaattgaacttctgttttgccactatacggcctgcgttatttacggtttggagctgccgttgtacccggaatattcagaattgcttcttttccgattactttaataaggcaaagatatggtttacgctgcttacagaaatcaggaaaagtcagtgattttattatttatgaatcaattattgttgccttaaaagaatggttggattataatatacaagacagacaatttatcatattttatcggggaatgaatgtctccctaagtagttcacacttaaaccgcttataaaagctgatgacttctgcaataaatataaggcagaggtgtcggctttttgttattgaggaggaatttatgttattaagtatttcattaattttactggttggtatgtccatgagctggatataccggaaaataaaacttccgggtttactgggaatgctggttaccggtattgttcttggcccatacatgcttgatttgttagacgaaagtatcctgggcatatcgtcagaattacggaaaattgccctgatcattattctgaccagagcgggcctggggcttgatctgtcagggctgaaaaaaatcggaagaccggcagtgctgatgtgttttgttcctgcaagtctggaaatccttggaatgatactgctggccccaaagcttatggggctgactgttctggaggcagccattatgggggctgtactggcggcagtttctcctgcagttgttgtaccgagaatggttaagcttatggatgagggatatggtgtaaacaaaggaatcccacagctgattctggcaggcgcatctgtggatgatgtgtatgtgattgttttgttttcaacctttacaggaatgatgcagggtgaaagcgcttccgtgacaagctttcttaacgttccggtttctatatttctggggggtgtgcttggactgctgctcggtaccttttttgcgtactattttaaaaaagtacaccttagggatacagctaaagtacttatcatattaagtgtttctttccttcttgtagtgatagaagaccatctcaatacaccaattacattttcagcgctgatcgcaattatgtttattggaatcggactgcagaagaagagagaagctgttgcgaaaagactttctgttaaatatggaaaactttgggtaggggcagaagtatttttatttgttttggtcggcgctactgtaaatattgaatattttgggaaagtgggtgttcaggcacttgcagtaatcctgggagcactggtattcagaatgcttggtgtgtttatatgtttgcctggaacagaccttacaggccgggagaaaatgttctgtatgctggcctacacgccaaaggctacggttcaggctgccattggcggaatccccctttcccttggatttgcctgtggtgatatggtgctgacagtggcagtgctggcgattgtactgacagcgccgcttggggcgcttgcaatagattcgttgtataaaaaatggctggtaatataaagttgtctggtacgaatgtagaaggttttgtatacgaactgacgcatttatataaatactgtacagattagaaatgatagtgtatcagggtatgatggagagtgatggaatttatcgacggtatattaaagaaaaaaagaagttgttttaggagaaaaggtttggaaaatagaaagattatctaattgttttatgaaatatattatacataaatgacaaatacataatttggcataatagaatccgcaatctgcgtatacaaagaaattttaaggtttatatgtgtattctgcagagtcaaaacaacgaggattttgtgtactttttcaaattcacttatttacagtatattatcttattatactggctattttgttgaaatactaaataatattaaaaacaaaataaattttgaatataaatctgttatatttttatttacaaaataatgatataatcatataaataaaagcggaaataattatgagaaaggaagataagtatttgatgaaaaagtatcaagttttaattatagatgacgaaatcagaattgctcttttaataaaaaagctaattcattggaatgaaattggattagaatgtatggatgtagttgataatggtgaaatagcgttaaaaaaaatcagggaaggaaagtatcccgatattgttattacagatattaggatgcctaaaattgatggcctggaatttatttctatgacccaaaatattggatgtgatataaagtttattgttatcagtggatataaagaatttgaatatgcacatagagctatgcagtatggtgtggagaattatttgctgaaaccagtgaatgaaaaagaattaaataaggatttaaaaaaaatagtggatgaattaaatatacagtggaaagcggaaaaggaacagaaggtgcttcaggaagttgtcacagaaagtcgccatatcataaaaagagagtttttaaaaaatataattgagacagatatatcaacggaaccggcggattctactgtatctcttcagggagaaatatatagaggaatagatattaaattagactatatagactattcccaaaaggatgataagcaagatatacttatggtgacgaaaatagaagaaatcgtggaacagatattagaaaatgtggtagaagaagtattgatatgtaaaaaagaaaatcttcatatttactgtctgtttaattatgatgttagtaatcggaaaaagataaaagagtgtataaatagaatattatcagatatacaggaacaacttttgggatttgagcagtatgaagtgacaataggggtgggaacagaaagatcagaatttggagaaatcagattttcaattaaagaagcaaaccgggcaataggaaatcgtatcaaagagggtgtaggaagattgatctattcggaatcgatagagtcagatacgcaattagatagagaatacttatctccattggaaaaaaataatataaaaaagtgtctggaaagttattctgtagaaatgttggaaatgttgattaatactatgtatagagaatatcttacagatgaaaaaaaagatttttcagaatgctatttaaaggcaaaagatgtggtagattatttttttgatcaatttgatatgaaacagaatgagattaaaaagattcgaaaagatatacaggaagggtgtcaacattgttatacattaggtaaactaaaaaaatatttacaacagaatttaggagattttttgaaagagagttgtgaatctattaaggaagaggctgccaaaccaattcgacaggccagaaaatatatagaagagcattatgcagaaaagattgttttggaggatattgcaaagcttgtaaatttgaatccagtttattttagtgtgctttttaaaaaagagtgtggtatcaatatcagtacatatttaatggatgtaaggatggaaaaagcaaaagagtttttgcaaaattctaatgatacaatagctgcaattggagaaaaggttggatataaagatacaagatattttagtcagacatttgcaaaatatgtgggaatcaaaccaatgctgtatcgaaaacttcattcgtaggagaaagtaaatatggaatacatgaaaaaagcgaagaaaattgtatggcttatttttggaggatggttaataacaattttatgtctgatcaggtcagggtgtccaaaggaaattgttatactgatatttgcattggaaatgatagcgttggcatatgtttggttggaattaattaaaccgctggatatgtttgaaaaatacatcaaggaatgtctggagggggaattaggagagtcaaaaataaaaaatattcctttgaatattccatttttgtatcagattactcagcttatggagaagtatgctgtgttaagaacaaaaaaaaatacggctcagatttttgataaacaaacagagcttactgcattgcaaagtcagattaatccccattttttatataatacactggagtgtataagaggtcaggcattactggatgataatatagaaattgcaaaaatggtagaggctttatcgtcattttttcgatacagtattagcaaaaagggaaatcttgttactttacgggatgaacttgcaaatactgaaaactatatgttaattcaacgctacaggtttaacaatcgtttttctatggaaattattatagatgaagaagatgaagtagcttatgattttttagtaccgcggcttattatccagcctgtgatagaaaatgcaatttttcatggattggaagaaagaatggaaggtggaattgtatctattgaagtgattgtgacagatttagatatgattattacaatttcagataatggaaagggaatagattgtgcagaactggaagaattgaataacagaatgaatgccaatgatatggaattggaggataaaaataatcagattaatacaggaattgcgcttcccaatataaacaggagaatccgtttgctgttcggagaagaatatggtgtaaatgtatatagtacattagggaaaggtacagatgtagagattattattccagctaattataaaagagaggaacatgaaaatgaggaaagagcttttgaaaattaatgacctaaattatattcattctcaggaaggtaaactggaaaacatatccttatttattctggcaggagaatgtgttggctttttaggtctatcctattcaggaaaagatcttttagtgaaattgttatctggaaatacacaaagagagttttctaatcatatacatattgcgggaagcgataaaacatatcagcaggacaaatttgaaaaaaatatttataaaatttgtcctgctaattatttgataggagactggactgttgcagaatatttatgcttggtggaatcaaaaaaaagccgattatatctgcgaaaaactgagttagaaaatgaggcagaaatgtacctgaaacaattaaatctgcaaatacaggttacgaagaaattaaaacagctttcagagatagaaaagagaattgtagattttgccaaagcctgctatagaggagcaaaaattgtgatcatagaggatgagttcgaggggatgagctatgatgagatacgaatgtttgctcagatcatacatagattggttaaagaaagaattggagtgattgtaaacagtcattctaattttgttttaacaactttatcagataaatacattatatttaacgaaggacggattgtaaaaaagtgcaaaaacacaaataatgacagtgaagatgagttaaaccagtttttacatgaaggacagatagaggaagaaacagaaaaaagtttctgctttaagaagcaatcagaatcgaatgacttgtggtactgtgtaaaaaatctggaattaatagagggagaaactgtagagattaatttaaaaaaaggagaaattattacaatcgtttctcataataaggtacaaaaagataaaatattcaaggcattgtcaggaagagaaaagataggaaatatactttatattattaatgggaaaacatatagtaagatagattatagtaaattatcagaagaaagaattgtgtcggtaaaggttctgggtagtttagacgagatgtttcaaagaatgtctgtagaggaaaatttattattgccgtcattaaaaaaaatttccgcatttgattatataggtttctcaaaaaggattcgcgatatttttatgtcggaaatgaaacaggatacaactcaaaagggattggggataaaggaattaaaaattaatgaattagtagaacttactttagcacgctggtatatttttaatcccaaagtaatagtattgcttgagccatttggtttatgcgatataaatggagttgcaattgtccgaaaatatttgaaaaagttttcttctaagggtacggctgtaattgtaatagctgcccgtacggaatatatggaagatatatctgatagaattatagacatgaatttttaactatttattaaatgaaattcttaagaatatcacacctattctaaattttctcgcattgataagcgattaatccgaaattataatataaacatcttaaatcaaacagagaaaaatacaaaataaggaggaaaagattgaaaatgaaaaaaagaatgatggtaacattattatcggcagcaatggtagccggagcagttgtaccgactgttacatgtatggctgcagaaaaagcagaggatatgacatttgttgttattcctaaatgtgttcatgcatggtttgatgaagtaaataaaggtgcccagaaacaggcagatctcctttcagcacagcttggtgtagaagtaaaggtagattatcgtgcaccagaatcagcagaggtttctgaacagaattcaacacttgagcaggcagcagctacaaatccttctgccattttacttgatcctgttgattatgacggaagtgcagatattattaaagagattcaggaaagagatattccggtcattctttttgatgcaccgtcgccggaaggaagtgggcttacatccgtaggcaatgatttttcagagcaggcaacgattgcagttgagatgcttgttgagaaaatgggaaccaaaggaaaagttgcagtaatgcagggagctccgactgctccgaaccatgcagaaagatatcaggcacatttggatgctttggcgaaatatccggacattgaagtgattgatggcggaattgacaatgataatgttgagactgcacagtctcaggcagcagcagtattggctgcgaatccagatcttacaggatatttaaactgtgacgcatgtggtgcaggtgtagctcttgcaatagaagaaaaaggtatgcaggagcaggtgacatttgttgcgatggacaacctgattgaaattttagactatgtaaagagtggtacaattactgctacttcttctactttaccacaggagcagggaatgtatgcaattcttatggcatatcaggccacacagggaatgcctcttccggcaacagtagatactggaatcggacgtattacagtagataacgttgatgagtggattgaaattgtaagtggaaagtaaacagtacaatagtaaattttttaagtgagtattttggtgagggcttgtgactggattaattcaagttgctcgccctcaccttttcatatgaggagcataaaaatgaatatattagaggcaaaaaatattaccaaaatgttccctggagttatagctctggattctgttgatattgcttttgaattaggagagattcatgcaatcataggtgagaatggagctggaaaaagtactttgattaaatgtctgactggggtttatgaaccggaagaaggagaaatattgattggtggaaaaaatgcaatgaaaaataaaaatcttttcaataaaattgcatatgtaccacaggaaattgacttatttggatatatgtcagttgcagaaaacttgtttattccgtatgaaaaatcaggaattaagggaacggtaaatcagaaagagttggaagaaagggcaatttctgttttggaaaaattttcgattccagtaaaaccaggagatttggtaaaagatatttctatttcttcacagcaacttcttcaaattgcaagggcaactgtccatgaggattatgaggttcttatgttggatgaaccaacaaccagtttaacaagcaaggatacagaaatcctgtttgatattgtaaaaaaaatcaaaaaagaaaataaggcgattatttttatttcccataaactggaagagatatttcaattggcagatgttattacagtatttcgcaatggtaagaaggttgcttactcagaacttaaagatgttgacaacaattgggttattcgacagatgacaggtagagagcttgaccagaatgaatatttttattccgaaaaaatttcggatgaggtattgctggaggtaaataatcttacaggagaatatttcacagatgtaagtttcagcttgagaaaaggtgaaattttaggtttttcaggactggttggagctgggcgaagtgaacttatgcaggctattttcggatatcttccagtatatgaaggaagtgtaaaatttagcgggactgaatggaaactgggagatacaaattattctgttaaaaatggatttatttatcttcctgaagaacgtaaaaaacaggggattttaccagaattatccataagggataatatttctgttgcagtgcttgatgaattgaaacagggaatcagcatttcagcaaaaaaagaagaccaattagcgaaaaaggtaattgatacatatgaagtaaaaacacctggaacagataaaaaaatacagtttttatctggtggtaatcaacagaaagttattattggacgtgcaatggcatgtaagccaaaattattagtatttgatgagccaacgaaaggaattgatgttggaacaaaaacagagatataccggttgatgaaaaagcttgcggaagaggaacagataggaattattatgatctcatctgaaatggaggaaataaagaaatgttccaatagaattattgcaatgtatgaaggcaaaatatccggcgaatttgatgcaacagcagataagcaatctattcttggttctattattggcatgaattctgtagaataaaggagttttgatcatgggcagagaaagtgaaaagcaaaaaacaggaaatgcatttattgcggcattaaaaaagagcaatatgacagcgatggcaatgatattaataataatgattatcattgcaagtattgtttctccatactttttgaatatttataatttacagtctgttttaagagatctggcatttgtcggaatgattggtatagggcagtccttgttgctgctagtaggtgaactggatttatccgttggcaaaattgcctgcttaagtggaatacttacaggcatgttgatggtaaatgtaggcttaaatccatggctgtgcttggctctgggattggtatttggtttgatattcggacttatcaatggtcttatcattacaagactcagattaaattcaatggttgcaacaatcggtatgcagggggtatatggaggtatcaatctggtaattacaaaaggaaaagcagtcacaggaatacctcaggatacacagtttcttggaaaaaaatctgtcggaccgattcccattccatttattatttgtatagtagtccttctggttgttctgttcatagtaaagaaaacaaaaacaggcagatatatttatgcgattggaaatagtaaagaggcagctaaaattcttggaataaaagttgaccgtattcgagttatgatctattcctttgtaggattgatttcagctatggcaggtctgttatatgtatgtcgtcttggatctgctcagactgcaattggtgaagactggccaatgaattctattgcagcatctgttattggcggtgtttctcttaccggaggtgtgggaaatccggcaggagcattaattggtgcagcagtaattacggttattcagaatattattgttctgtttggcgtcaattcttactggcagtcagccgtcagcggtattgtagtagtactggcaatttcttttagctctatttctgatattgtacgtgaaaaccgacagaagagaatcaaactgaattagggagggatgctaaatgaaattaggattaaacttatcttttgcagtaaaaagatggatagaaccggaaagacttgcaaagctgataaaagatgactttggtgtagaacacattcagtttacttgggacctgattgatccctggtggccggagaagcagcgaaagattatggcacaggagtataaaacagcatttgaaaatgctggtataacagtggatgctacatttggagggctggcttcttatacttatgcacatttactggcgccatctaaaagacagagagagattgcgttttcgttttttaaaagagcaattgatcttacaatagagttgggggcagatgttatggggacacctgtaggagggctgtcctatgatgatgccagaaatcctgaaagaagagaagagctttacaaagagatgctgcagtacataagaaaacttgctgaatatggaaaaaccagaggcttgaaggaaatccacatagaagcaacacctttaataacagaatttcctcatagcccacaggtatctgtacagatgatgaaagatctggaaggaacggaaattccggtaaaacttcttatagattggggacatgcattatataaaccgttgttaaaagaggaggcagatattcatctgtggttccagcagtgtgctccatatattggatcgctccatttgcaacagacagacggattattagacagacactgggattttactcataaggaaggaatcatcactccggaattgattagggatgcagtgcacagggcaaatctggaaaatattacacagtatctggaggttgtaacaatttttgaagaagatgacgatacggtatataaaggaatgaagaaaacaatggagtatcttcacagggagttagagtgttaaaaggagaggtaaatggattacagagaaacatatcaaaaaattcttgaagaatacagggaggtttttgaacgcctggatcagaaaaacatgagagattttatagatgaagtaaagaatcatgatcgtatttttctgattggtgtaggtcgtgaaggcatggcaacgaaagcttttgctatgcgtctgatgcatatggggaaagatgttcactggatctgggatgataccactccttccataaagcctggtgatcttttgattgctacattgggagacggaaagatcggacatattgattatgtttgcagacgcgctaaagaagcgggggcatttatctatgttgtgacaggatctccaagtggagaaacggcaaaaacagtagcggataaagtattctttgttccggcagcagtgtacagaggaacggatgatgtagtaccttcctttcagccaatgggaaatttatttgaacagtgcttgctaattctgtttgatattatcatcatgacaatggtagatgagatgccggggctttcgtttgaaaaaatgtctgccaatcatcgcaatattgagtaggtattagaaacctggaggatgtataaatggggataaaaaaaatattaaataaagacgtatcgaatgttgtagaagagagtttgactggttatttaactgcttacagaaaatattataaaaaaatagaagattataatgcgttttattataaaaagcacagacagaataaggttgcacttgtaataggtggtgggagcgggcacgaacctctgtttacgggatattgcggagctggtctggcagatgctgttgcatgtggaaatgtgtgtgcatcccccaatcctgaattgattacagaagctgcaaaggctgtagatcaggggaaaggtgtactctttgtatatggaaattatgcgggcgacaacctgaattttgacatggcagaggaaatgtgtcaggcaaacggaatgaagacggcacacgttcgagaatgggatgattttgcttcagcgcccaaagacagaattacggatcgcagaggtattgcaggggacgtttatacaatcaaaattgccggtgcggcatgcgatgcaggactcagcctagaggaggtagtgaggattactgaaaaagccagagataatacaaatactataggtctggcaacctcaccgggaactcttcccggaaacgacaaacctacctttgaaatttcagatgacgaaatggaatttggaatggggcttcatggagaaccaggaattgaacgtaccaaaatgatgccgtgttctgatatggttgatcgtatgtacagagaattaaaattggaaatgcaactgaaagcgggggatgaggttgcagttctggtaaacgggcttggctccactcctttattagaattaaaccttgtatattatgaattgtacaaacggatacataaagaaggtcttaaagtatacgatgcagaaataaagacttattgtacctgtatggaaatgggagggttttctattacattcttaaagatggatgatgagctaaagccatattatgatgcgccgtgcttttctccttattatgctaaaggctctgtagcatcagtaacggtagatacaaatgaggatgagcaagagattgaatttgatgaaacggatgtagagccgactactgttgtaagaagtaaagagggagttcttgagcagttaagcgtaaaagatgccagaaatatgctgttgtatgttgcggataagattatagcaaataaaccgtatctgacagaagtggacagtgcgattggcgacggcgatcatggaatcggcatggcaggcggcatgcagaaggcgaagaaaaagcttctcaagatggaagatgaacgaaatgtatatcagatatttgaaactgcaggacaggccatgttaatgtctatgggtggagcttctggtgtcatttttggaagtttatatcttgcaggtgcaaaaggaatggaggcaaaagagattcttacggcccaggatattgcaaagatggaagaaaagagtctgattgctattcagaaacgtggaggagccaggttgggagataagaccatggtagacgcacttgctccagctgtagaggcgttaaaagaacatgcgggagaaggtcttttggaaatgatgaaagcagcagaatatgcagcgaagcagggtgttgaaaatacgaaacagtatattgcaaaatatggtcgtgcgaaatcacttttagaacgggctattggttatcaggatgctggagcaacttctgtatatctaattttccagggaatgagagaattcatagaaggcagtatggaaaataattaaataaagatatctgtagacatttaactggatattttaccggaaagaaacggaggggaaaatatgatgaagatagcaataggatgtgatccgaatgcacagaaagaaaaagaagagataattgagtatattgaaaaaaagggttatggtgaagttaccgattttgggagtgaagatgttatctatgctcatgttgcagtaaaggtgggagaagcaattgcagccggaaagtatgacagaggaatcttaatttgtggaaccggaattggaatgtctatttctgccaataaggtaaaaggtatcagtgcagctctgataacagatgtttattcagctgaacgggctcgtttgagtaatgatgcaaatgttgcatgtattggagctttcacaaccggatgcaaaacaagagaaaaactgatagatgcatttttaggaaatgaatttgtagaaggatgtgcttcccagcccaaggtaaacgcattcagagagtatgatatgaatcgaaagtgattctgaaagcggatatgaaaggaaagggatatgaagaaattatattttggaagtaatctgaaaatgtataaaaatagaaaagatactgtttcatatcttcaggaattagcagaactgactaaggatatcagcagagaagagtttcatttatttatcattccttcatacacatctttagaggctgcgtcagaacaaattgacagaaaccttattcagattggagcacaaaatatgtgttgggaagagcagggacagtttaccggggaaatttcaccactcatgcttaaagaaatgaatctggatctggttatgattggtcattctgaaaggagacatgttttcagagagacagatatcgaagaaaataagaaagttcttgcagcattgaagcatgatttccagacattgttatgtgttggtgaaactctggaggaaaaggagtatggaataagcaaggaggttcttcgtaaacagctgattgtaggtttccataatgtttctcctgtatatgcaaaaaagatatgggttgcgtatgagccggtatggtcgattggagttaatggtattcctgcttctccggattacgcagaagagatgcacaaagtaatcaaagaatgtttgtatgagttgtttggagaaaacagcaatgaaattcctgttttatatggaggaagtgtaaatgcaagcaacgcaaatgaactgattacaaaagagtcagtagacggactttttataggaagagcggcatgggatgctgagaaattcaattcattaattcgtgatgtcagaaggaattataataatcaggaataaatttagttgagatgggctgaatataaaatatgttattagttacattgggcagagccgagttttgaggttctgcccttacttgtattatatgcagattccaggtaggtcaagcaggactggtttacttaactctgatggagctctgttacttacagtacagatagtcttttttatgaaaatttttagcaggcagtcatttgagaaaaatatagttttcgattctgaatgctgtttttccggtgtctgattttttattctctcatcaccttttcccctttccttcataagataaggagaaggaaaaaggagtatcgcaaatatgaaaagtaagcgcttaaatcttggtgttagtgatttcatgagctgtcaccagattgctcacatcagttgacgctcacttgcttaactttctgtcaccagtcagttaggcaataccgcctgtttccaggcggtacctgctttatgaagttaccatcccaagcatctcgtgttccacaacgaacttgatcatataatcatcgatcaatcgtttctgattttgaaacgcatacatcagagctttttcacagacacggttgatcatccgtgggattcctgcagatgccttatggatctcatccaatgccttggttgtaaatatttcctgcccgcatccggagtaatccatgtggcttgcgatatattgttctgtttcagaacggtcaagatgaggcagcgtacagtacatgtcaatgcgctgccggatggcggcataccgctgtagctttagtttattttcccacagttctgtctgcccaactaaaacaagagccatgggactcatggaatcaaaccggtaattgagcaaaaagcggaattcttccagcgtctccttctctaacaggtgggcttcatccaggatgcagacaacctttttacgctgtacgccccggattacctcgatctcctgttgcagctggcgctttgaatcaccgcggtagaaacgggattccagccccaactgatccagcagacctttatagaaccaccttggggtcagttttgagtctgacagataaaggatgatgtaatcctcttttggaagttccgaataaaaccggcggataagcgttgactttccacaccctgaatcagctgttacaacagcaaacatctggcggtccgccacataagccagacggccgagagtttcccggaaagcattggattcgaacagtttttcaggagggacatcccggacaaacggtgtatgttccatgccaaagaatgattcatacattagtcattcgcctccttccggtaagatgcaaatgaaatcgcatctgccatctggtacttactctgtgtatatttcgtttccagcgcatccagaaaacgggaagttgtcggcacttgtccctgcatggcagccggaagtgttgcctgcctgtcgcaatacggtccaatctttacaggacttgcctgaaaaggttcaaatccgggataggaaacggtgatgatctcaggatttgccggatcataggagatttccaccgtatatccgatcagggcaggtttggtttcatacctttgcccacggaaactgatacaggcacctttatccacttttcgctgctcatggtgcaggaaagcttcggctacaacggctgtatccaaaaaagtcagtggacggctgtcccggttccattcctgcagtggtgatatcccttcttccggaatggcggcaccgaggctttcgtagtattctgcaatgccatcatgctttttcttgtggtaatactcatccaggtagattgcccacaaacggttcagttcctccaatgttctgatatttttcagctttgattcccggataaaagcatctaccacctgatggaacttttcgattttccctttacttttgccggatcttggttttgcatacatcacacggatgcccagccttgcaagggaagaacggatctgttttgcgatatactgtgttccattatcaaagtaacaggaatcgaagattccataccgggaaatcgcttggtgaaacgtatcttcaatgattgattctccctgattgtcataaaaccgggatgatagaagatacctggaatggtcatcgattgctgaggacaggtaagtctgtaccttagccccatttcttccgattggaagcttgggtccatacttgatgtccgcctggatcagcatcatacggtgcggtttgcaaaagcgtttggaagaactgtttcttgcatcctgatacatttgcatctgcttttgtccgtaaccagccttatagatatggcgttccaaagtagaacgctttaaagtaccgggtaccgcaagcccttccgtttccagaatgtagatgatctgggcaaccgaccgctccggaacctccttgcgaagttggattgcctgttccaacaggaacgaaaagttttccggaagtttttgtgaccgatgtttctcacggtcagcaggttttagccctgtaaactgcctttccgaaaaagctttttcatagcggtaaagggaacggacagatatgttgttttcctctgcaatctttttgcgaagctggatacgctttgcatcatccagaccagtctggagaagcggtgaaatcaattgaaaacgcctgagggcttcttcctcttgccattgttgtctgtttattgttgtattcataagataatgacctccttttgagtccaatataccctttggtactttgacagacgatgcaaagtaggtgcataagccttaccagcggatcgggactaaaaatcctccgctgttgtaaatctggcgtaagatgatttccaaccagttttgatattgattcctgaaaaaatcgagcagtgaaccaggggaaatcctctcttcattataacccagcaggaactcccggatcgtccttaaatatccgttgatacgttcaagattttcgcagaaccattgcagccagcggagcatggtagcgcaggacgggtagtcttcagaatctaagtcttccggctgtacaacgccatccagcaccccggagatcacttctgtttcgtaatgcttgtacggaacaagacaatccggaagttcattatgataagagtggcagttcttacaataaaaccgccggatgatcaactgatcttttaaaccgccttcctttctacggatgcgtgggcgtgaatcccggtaacgaagcgtagcctgacagatggggcacatatgggtggtcacactgctctcaacaaaaaacaccaaaatcctccttgaggacaagtgaataatctgatataataaccatggtttagtgaccagggtctcagagtacacaacttgccgggagggtgctctgagaccttttcctttttgtatgctgatgacagtatacaggtcaattcagagacaggcaagtaaatcagtattttgataatttatgaggtcaacaacatcttgggtagctttactgtctacgtttttgaactcataatgatagcaaatagatttttactacactccgcttgataggagatagaaatttactatatttggaggtttcattatgagtaataaacgtgctccaggacgttccctggacgaatggatggaactggtcaccgaatgcagacaaagtggcctgacagatgctgcatggtgtaatgaacatgggatatctcccagctgtttttacaatgcagttacccgtctccgcaaaaaagcctgtcagataccggatccagttggaaaagccagcactcttgaccttacgtcccataaacaggatgtagtccagattgctatagaaccggagtattctccggcaggactgattccagataatggaaacagtcctatgcaccttgacaattcacatacgattgaaatcgaagcagacggattgcttatacgaatgagtaatgagatcaaaccggtacttctgaagatgcttatggatacgctgaaggagtcattatgttagcggacatctcaagtgttgatgcgatctatatcgtctgtggcagaacagatatgcgcaagtccattgatggattatgtgcgatcatccaggaacagttttcgatggagatcgaccatgcactttttcttttctgcggtcgtaaatgcgaccgtatcaaagctattttaaaagaacctgacgggatcgttatgatctacaaaagactgaccgcccagggatcttaccggtggcccaggaataaatctgaggtccggaatcttacatggcgggagttcgactggctgatgtctggcattgatattgagcagccaaaagcgatcaaggcaacgtaaaaaagatgcacataaaactcttgttttttgctgtattttcggcactttcaaggtctggtaaatccgctgttttgctgggaaaagccactgttttctggtataatggaaacatcagaaacaggaggaaaaagcagtggcagacagttccaaagatatccagctccgtgagctgaaggacatgataaacgatctcaaaaagatgataaaaacacttcaggcaactgtcgatgctgccaataaacgggaagaggctcttacccaggaacgggataacctgaaagaagagatagaccttctccgtaaaaaactgtttggcacctccagtgaaaaaagaaccatcgatattccaggccagttaaactttttcaatgaagcggaactggaacaggatccagaagctgtaaaagcagaggatcttgaggcacttcttccggaaaaaacagcaaaaaaacgaaaagcaagagctacagatgctgaacggtttaagggagttcctgttgagaaaaagtatctggaactttctgaggaagagaaactctgccctgcctgtggtaccccactgaaagaaatcggggaagagtttgtccgccgggagctggtttttgtaccggcaaaactgaaagtatatgaatactacagtaagagctatgagtgcccgcagtgcaggcttcaggatataccggttatcaaaaaaggaaaagatggcagatcccatatgctttatggaatggcttctgccggaacggttgcctgggtaatgtaccagaagttttgtaatggtcttccatactaccgtcaggaaaaggactggaaacagtatggcgtggagatcaccagagctactatggcaaactgggtgatccggaattctgaagcattttttcttcctatgtacgaatacttccacaggaaacttctggaacgtggattcgcgatggcagatgaaacgccacttcaggttctgcatgaaccggaacgccgcgcgcaaaccaagtcatatatgtggctgttccgcagcggtgaagacggaggaccacctattatcctctataaatactcggagacccgggccggggacaatgccgtagattttcttcacggcttcaagggttatctgatgtgtgatggctatagcggatacaataaagtaccggatgccaaacgcacagcctgctgggcacacatcagaagatatctgacagatgccatccctaagggaaaagcactggattatacccagccatctgtacagggaatgctgtacattaaccagctcttccatctggaagatgtgatcagatcaaagtattcttccttcgatgctataaaaaaggctcgccttgaaaaagaaaagccggtagtagaaggctttttgtcgtggcttgatcagcagaaccctacccgtggaagcagaatggataaagctgtcacctacattcagaaccgccgctcctatctgactacctatctcgaagacgggcgctgcagtttttctaataatctcagtgaaaatgcgatccgtccgtttacagtaggccgtaaaaactggctgttctgtgacacaccaaacggagcccaggccagcgctatcgtgtacacaatggtagagatggcaaaagccaatggcgtaaacgtctatcactatcttacttatctgctggaaaaactacctgatgatagaatgagtgatgatgaattagaacttctggctccatggaaggaaaccgtcaaagctgaaatcgaacgtcgtgcaaacggatcaaatcaatcatatgtgaattgtcaaggtgctccgactactgaaaagtagtcggggatttttctatcatacctaaaaattaagcgcttactatgaaaatcaaaaaaagagtggcagcggcagcccttgccgtccttctggcggtgcctgccctgccagctgctgttatggcagagaagaaaggtgataaaaaagatctgacaaaggtgactttaaatgaggttgcccattctagttttacgcgcctcagtatgttgccattgagaagggctattttgcagaccaggggctggaggtggagctggtaacaggttttggagcagataaggttctgacagctgtaatctcaggagtaatctgaaaggaaaaaagtacttggaggatgaaaagcggcgtacatatattaatgtaaatttagagagtattgtgattttatgtaaccggctggacggaatgaatagtgcaaacaattcggtttccacttgtacatagtgaaatgcctgtgttacaataacaaaataaactggttgtacaaaagagtgcaatcacaaaccaagaaaagttattggtagaagggagaaccgatatgaagtataatcaggttcgtaggggagatggtagtatcgtcaatgaggaaaaagttataattcacagtcttgggcgattagattggaatatttatgattgtatttccagtaatcatataaccgatgaggtaattattacagaagaacaaatgatgcacattcgtgaaaggcatccggaagcatacacagatacgatgcattatgtaagagaaatattagatgatccggattacattttcagggacaagcgtcccaatactggtttggttgtgaaaaaaatttttaatgatgaagaaagttctcttttggtacttaaaatcataacttctgacgataataaggattacaaaaattcggtgcttaccagttggaaaataactgaaaaaagattgaacaactatttgcgtaacaaggatattatttacaaaaaagcatagttgggttataatatgtatagaataagatagtaaagagattatttgaggtggtaaatttcgttgcaaccacgcaccctatgggttaaaagagatgcaggagccgcgacgcctgccaaataatctctttcagctataaattatgaatgctctgttctgaatggatagagctttttattttgcaatgaatcgaatcgttttctggtggctgattttttattctctcatcaccttttcccctttcctttcataaaataaggagaaggaaaaaggagtatcgcaaatatgaaaatcaaaaaaagattgacagcggcagcccttgccgtccttctggcggtgactgctctgcctgctgctgttatggcagaggagaaagatgataaaaaacaactgacaaaggtgactttaaatgaggttgcccattctattttttatgcgcctcagtacgttgccattgaaaaggggtattttgcagaccagggtctggatgtggaactggtgactggttttggagcggataaggttctgacagctttgatctccggggaagcggatattggatttatgggagcggaggcctctatttacgcgtatcaggagggagccacagatccggcagtgaactttgcccagctgactcagcgtgcaggaaatttcctggtggcaagagaagagatgccggattttcagtggagtgatctgaagggcaagaaagtgcttgggggacgaaaaggtgtcgtacacaaatcaatgtaaatcttgagtctatcgttatcatatgtaactggattgatggtctgacaaaggcaaaagccttatattcagccatcatataaataaaatatttatcgaaaggcggtccttgattggagcgtctttttttacgttaggagggatttacattgaataaaagttttttagaacactatatggaaaccaaaccagaaaccacagaacaaaaatatctatttcttgtagataatctggatattgcatatgcacttatctatgccggatatcctgctatttttcttataaacggatcagatgcttaccattcttcaaacagttttatcgaatacatggatgatattgcctgtaccggaacttatcagatggattacgtttatgttccagcctgttccagtaaaaaaataaatgatttactggaggtgtattgtcaaaataattacctaaactatcgcaagggatggattttattcaaagagaaagaataccttgcaaaatcagagtatttacctgagttaaaagcagttatatcggattttataaaacgcttcgaaggaaaaccatcagaccaaccggacttaaataaatttcatagattcaacgaacagggaaagcgaatcggtgtatttgatatggaaattgtagactatctaatacagacggttccttttttatgctcggaagtactccttatatctataaaaacggctgttaccatgaagatcgtaatggcatacagttaaaatctcacattcaaaagctgatatttcgtgattgtatcaaagcaactacaatccagggcatttacaatctgctggtatcacagccacaggtgcagaaacacttttctgacctgaacaatcagcctccccattgggtaaattttcaaaatggatattttgatgtggtggaatggaaattgattgaacacgataccaaatacctgatgattaatcaaataccattttcctttcatccggaacaagtggaaactgccctcgcaaatgtagcacagattcgtaagtatctggatttttctatccctaacgaaactgaccagcagatgttctggcagtaccttggatactgtatgactacagatactcgttttcagaaatttctgatgataaagggtaaaggtggaactggaaaatccattgccatttcctttattcagcacatcattggaaccggcaattattccagtatgtcactccagaatctgaatcaacgattttatccaaccggattattcggcaagttgttaaacgcctgtgctgatattccaagtacagctatggaaagcgtagatatcatcaagaaagcggttggggaagatacgcttctttatgaaaagaaaggacaagacccaacacagtttaacagctatgcaaagctgttattctcagcaaatgaaatgcctttgaatctggatgataaaacaaacgcctactaccaacgtctgcttgttctagatatcaaccgtacaattccagaagaacaaaaggattctcagctaaaagaaaagatgtgccaggaatctgattatgccattcacatggcaatgctggcgttgaaacagttatatgcagataatcatttcgctgaaagtgatcatagcaaagaatgtatcgctaatctttatcgttcagctgacagcgtgaaagcttttactgatgatatgctctgccataaaggcggagaaaaaatgaaacgcagtgatgtgtataaaatgtatgaagaatactgcgaagacaatggacgaacaccacatgggaagtctcgattctgggaatatatggctgacaaaggatttgtgatcaaacgattctctgacggagtgtattattttaaagatacttcggtaaaagaatccgattttgaaacgatagacgatacaataacgaatccatttgaacagatggatttggctttatcgtaaatgacagaaatgataaaaatggcaaaatgcaagtggatattcttgaacatagagagtgatgaaaagtttgttgatataacaggatatcatttttgtcattttgtcattatacgtttggggtattgaatattagttaaatttatttctttttaatcaacatctgctcaattgttgatttcatcttaatttgttatgattgaactatagacagcggccgatgttaataaatcaaaggaggctttaaatcatgcagataggaaaaaccatccgaaaatatagaaaagaaaaaggtatgacacaagaagaaatggcaaatcgtttaggtgtaacaactcctgccgtgaataaatgggagaatgaaaactcttatccagacatcacattgcttgcgccaatcgcacgacttctgggaatatcccttgatactcttctttcgtttcaggaaaatctgacaaaagaagaaatcgcttcgattgttatggaagcagatcagaaactgaaaacggaaacttatgatgaagttttctgttgggcaaaatccatcatcgaatcctatccaaattgcttaatgttaatttggcagctggcaaccattctggatgcacagcgtttgataaaagatattccaaatgccatggattatgatgactatatcctaaactgttataagcgtgcattggaaagtgatgaagaatcccttcgcaccagtgctgccgattctctctttgggtattattctcgaaacgaacaatacgaaacagcagaacaatatttgcagtattattctactcaaaatctacagcgcaaattaaaacaaggtattatttacagcaaaacaaaccgaacagatgatgcttacaaactttatgaagaaatcttgttttctgaatatgggattctaagtatgactttaaacagtttatacatgctctacttagaagaacaaaattttgataaagcacatttctttacagacaagcaggaagaactggcaaaattatttgaaatgggtaaataccatgaaatatcctgtagactggatcttgcaactgctgaaaaggatattgatactatattagataccatggaagtcatgcttactacactggatgatatcaccagtttttcaacctccccattgtatgaacacatggatttcaaaaaatcaaacagcacatttttagagcaactaaaacaagagttattgaattgcttccaagataaagaaacctacggatttcttgaaggaaatgaacgctggcataaaataatacaaaaataaccaacgaaactttataactgaatatgaccaatcaggtcagatgaagcagccgatgcattttgagcgaaaagccaatgcatcggcttttcttatgcctaattattcggtgaatgatttggcataaaccgaaggaacgaaatgaaatctcaattgtgatggaattggttctttcggagcaggtgtacagaggaatgcaatttctttgtgcatgggtacagggaatgcaatatccctgtgcaggtcaagggcagccgccttgcccagttcagtggcgcctcgccacttagtactgggcattacttgacgctaaaagcagcaaggaatcagcttcgctgtctaaatccctttcagggaaattttcaaagaatggagcttcctgtataataaaaaatgtggatgttgaaaattgaaaatacctcagagtacaataagactactgactggcaggttagtaaaaatcttattgaacagagaggtatctacaatgaagtctaacacacagaataaaaaaatagaagcaataactgaaaaaactttggtaatcggaatcgatgtaggaagtgaaacacattatgcaagggcgtttgactacagaggcattgagtattcaaagaaaccatttaagtttagtaacacagaggccggatttgtgacatttaaggaatggatcctggacctcaaagaaaaacatgagaaggataaggtggttccaggcatggaaccgacagggcactactggtttaatcttggaaagtatcttcaggataatgaaatgaaaccagtacttgtgaatccacatcatgtcaagaaatcaaaggaactcgacgacaataatccaactaagaatgatcgtaaggatccgaaagtgattgcaggtctggttagagagggacgatacatgatcccatatctgccggatggtgtttatgctgatctcagaacagcatcaaacataagattccagttacagtcggaacttacaagaatccaaaacaggatcagtcgttggttcaatatatattttcctgaatataagacggtatacggaaagccggatgccaagagcggaatgctgatccttaaggaggcaccactcccggaagatatcctgacgttgggtatcgatggagtggaccagatctggcgggatgcaaagatgagagcagttggaaaggcgagggcgaagaccctgatcgaagctgcggagcacagcgtcggaagcaaagaaggagcagtatctgcaagaatggagatccggatgcttcttgaggactatgaatccagaaatatgcgtctacaggaagttatggttctaattgaagaactggtaaaacagattccgatggctgaaaagctgctggaaatcaaaggtgtgggaatcaagacagtgtccggattccttgcagaagtaggtgatatcagtcgcttcaacagtccgaaagaactgcagaagcttgcaggattggcattggttgagaacagttccggaaagcacaagggagagacaacaataagcagacgaggtcgaaagagactcagatacctgctctttgaggttgcaatgtcgcttgtagcgaagaacccggagttcagggaactacataattattacacaaccagaaggctgaatccattgaagaaaatgcagtcacttatggcgattgcagccaagctgatacgagtcttttttgcgatgctgactaaaggtgtggattatgatccgaaaaaaatggtcagtgacatcaagagaccggcagtttatctacaggctgcataagaaagacaagtaactataatggaggctgtcacgtggacagccactgaattaagcagaatgtaacagataacgtccactgatcacagtgctggaacaggaagcgagtcagtaatcaataatacaaagaatgagccagtagtcggcaggaatattttccatagggcatgaccctgtaatggagcatagctgacaccctggttatgggcaggcaggacgaaggaagttaggacctctggagacagagatgatcctggtggatataggaggttagctgccatagagggatgggtatatacaaggccagtaaaacggaaatcaatgacgttttatttcgtataccctctaaccactatttcagtacctgatacatcgaaatgctcatagctgtggcttattcactgagatatgaaaggttgaaaaaccttgaattttcaatagaaaacacttgattatatgaggaggaacatcataatgaaattaacaagacacaatggtcgtgccgggaaaaatggtgcttacaatcccaagcacaatgaccgcagttttaatattaataatagtgagcacatcgatgaagaacgggcaaaaggaaatatttactgggattgcttcaatggatatcgtactttttatgataagggaaatgaatgtgaactggctaacacatttgaagaagcggaagaactttattattctattcattacaaaggatttattgaaggacaaaatgaacgtaatattaagaatcgtcacccggaacgtaatcgcaccacatcagatatcttaaaacataagaaaacctgcccggaagaaaccatctatcaaattggcactttagacaatcaagtttcaccagatatattattacaggtagttatggattttatggttgaaattaccgaacgatttggtactcatgttcacatattggattgggcacttcatctggatgagagtacgcctcacattcatgaacgtcatgtgtttgattgcgaaaatcaatatggagaattatttccacaacaggaaaaagcgttagaaaagcttggttttgatttaccaaatcctgaaaaacctgcaggacgaaacaataatcgtaagatggtatttgattctgcctgtcgtgcattactttttgatattgccaaaagttatggattacaattagaagaggaaccagagtatggtggacgtaaatatttagaaaagcaggattacattcttgccaaacagaaagaacagttggctttgcaagcagaaaaacttgaagaattagttatgaaaatcgaagacgtggaaaatttgattgatgaagtttccgatgttgcctatgacaaagcagttgaagttgttactgctactgtcaaaaaagaaacccacttggaagatatccgattggtagaagaatcgaaaaactgggtgctctctccggaacgaaaagcctctaaaaaagaacgtgagtatgcagccaaacgattggatggagtgattgcaaaaattaaaaatactatgcagagtgcttttctgaaaatccagaataaacttatgcagccggaagtgaaaagggctggaccggagcagattaagatcaaagcacgagcttctgttttggataaattaaatcgtaaaaagaccgaaataaacgaaaagtcaaacccaaaatcagtgaatcgagagaattatcattcgcaggggttataaatcatcatagaataagcaagcattttgagaaacttcaatctgcttgcttatttgattacttatttactcatctgttcaattttatctgcagcaccttttacaccagtacatttatggaatccctcagaaatttttgctgcctgttcataataagatttggtatgtagcacattttcaatggtctctttaatcgattttgcatttacatacttcaatcggataccagcaccaagttgctctactctggtggccacgccatcctgttccgatgtttgtgggtacattacaagaggaaccttataatataaactttcattgacactgttcataccacagtgggtaaggaatacatccgcctgacttaacacagctatctgatctacaaatctcgaaatcgtaatattatacggtacagcacctaagtcttcaatatttatcaaattaccaactgacatgattacctggtatttcttattagccaatgcttctatacattttttataaaactctgttgaatcattgattacagttcccattgatatatagattaatttatccgacttcttctcaaatatattttcaataggccgtatggacggacctacaaagacatatttatctgaaaatgtttcagagcatggttgaaattccggagaggtatatacaatcgtatctgtattattatcgttctgaataatatcaagaacactttttacaggataacctttctcttgcagacgtttgatgtttttattgattttcgtcattgaaaaaatcataccaaacatctgtctcagactttgtttcattatttttgctgaatattgattaaaagcaaaggttgttgttgaagacacaaaaggaattccaagttttaacgctacagcctttccccatacagccatggaatctgcaacaatacagtctggatttaattctctcatgtgttcgcacaccgtatcatccaaagccaatgtagtatccaccaatatctgtgtggaaaaagccaaatctttccctacacgaactgcatctttcgcatccaatcgctgttcctgatcatattcatcacaagaaacaaaagttgctcctgtagcttcaatcttttcacgcatcatattgtaggaataataaaaaacctgatgccctctactgatcaattcacgcacaactcccaacgttggattggtatgcccgtgtgccggaatacaaaagaaaacgattttactcatatcaattcaccatcctttaggaatccatttctgaaaaaatccttgcaatatattctttttgcatttcctttggcaaaattgccaaacctcttttttcgtcacctaaaactaaaatttccattcccggctgaagatcaaataaatttcttgcctctttcgggataacaaactgtcctttttctccaattttaaccatccatgcgtattttccattgttcacttccataagcgcctccaaaggtatgatttgtatgaataatcatactctattttattactacagtcaatgacaaatctaaatgtaaaacaaactcgacatttaatgtaaagtcaactatactttaattgtaaggcaagctttacttttggaggtgaataatgaaaaacagaataaaagaattacgcaaagaacaccgcatatcacaagaagaattagcaactgcagtaaacgtaacacggcaaaccattatttctttagaaaacggcaaatataacgcatccctgattcttgcccatgatatcgctgtatattttgggaaaacaatcgaagaaatatttttatttgaggaggattaaaatatgttgattaataatgtaaaacttggaaaatccatagaacagaaaattaaattgcgaattctttatagtatcatactcttaatattgggcggcgtttcgttatatgtcggcacttgcattccgcttgcatccggcaatgctgactattcatctggttactatgtgggattgggatgtggtctgatcgctgcagcgattatcacaatcatcaaaaacttacgacttttgaaaaacaaagaagctttaaaacaaagagaaatatatgaatccgacgagcgaaacagaatgataggtttaaaatgctggtcttatgccggttatgcaatgtttattcttctctacattgcacttttatttgcaggcgctgtaaacgtagtagtaatgaacacaatactcgttactcttgccggatttgccatttgcttatttatttccagattgattttaaacaaaataatgtaatgctcatcccaataaagccagagttgttagctctggctttcatttttaacaaaattaaaagaggagccagatttctccgactcctccaagtatgcgtccgcaaacacataccccaattgctattcattttatcataatcaagaaaatagtaaaagcttactttttatatcttagtattttatcccagttctctggaaatcccatattttttaacagctgttctttagaaatgtgtggacactttttcaatgtatcatttatcaggcgaagtaaatcccttttaaatttcttaaaatcttcattccctattaaatatctcaatgcaataacggctgcaaacaaatcacttttaccacttacaaactgtccttttttcttgacaatcttaagtttgtcgtgaagtggcatatctggaattgtttcacggattctgaatgaatacagacgttctccatgtgcgcacacattacggcatctggctacaatcgtaatcaactgatgcaattgtttttctgtcaatccaccaaaacgtttactgattttcgttctgatatctgtaggtgcatattgatacattttagatacttgtccaaaggtaatggcattcattgctacccaaagtggtacgtttccatatgtatttacatgatgtgttatgtacgcatagctgcttggaacagatattgattttgaaagcgaattcacaagtcgctttacttcatgtgcatttttctttgaaagattgtaattatgttcgtctaaatatgctgattgattctctccatatttttcgcaaaaatagtatgaaatcatggatttcatatgacgctccacatggaggatatatttcaaaaacaatgttcggagttcttcatcaaaataatagaatgcaacgatttcttcaaatgtaactccgtaaatataattacctgatgccggatgcttaaaaagatttttgtatccaccgatcagagaataatagcttagcttttcaagaacttcttcagcatatgccagatttgttatcgtaagctgcttttcattctgcaatttattcaattgttgctcgtatgtaaagaacgtcttcggcatagctgcatttctccaatcttgtctttagttgcaaaaagggagcccacgcatgagctccctgggctgtgggcatctcgagattccacagcacaaccactacaaataatatacaaaaatgacacagaaatgtcaacggtatttttttgtagggtattatatattatattcattttttactgacgtattctgattatcgtttacgttgaaacatatgcaccatcattttctggaacaattcctgttcatactcatccaaatccattcccatattttgaaacatattcatgacaagttttgccatattcgtttcattaaactttggattcttttttttctgaaacaatgcctgttttcgcatattagccagttgcttttgcaattcttccgaactaacatccgaaaatggtatatcaaattcttttttgatgtcctttagaattacgagaaaaatactttttattttctctatgtccgcctctgttccggtaatcttttgagcattgatttcacgaatcccatgttgggtttcaattttgcaatccggattttctttgataagttcccttaaacttgctgtacccatatctatgacagcatttctgtttgcgaatccagcattatgttcttccgtaaaataggaattaatcgtatcaagaagttgcgggaagtaacggtgctccaacaatctactcaaaatatctccattcacgttcccttgtaacaactggagcagcgccttattggtcaaccccaattcttccagttccacattccttctgatgcgaatatccgatatgcaaagcaaataatccgtcgaaacattatagtattctgcaaattttataaccaaatcatggctgactgcttttgtttctccacgttcaatacgacttaacacggatgcttgtatattcaattcatctgcaacttcttgctgcgatttcccggtgccattacggagatcactcagacgttgatggatattatctgctggtaatgatttcatagattcatcctttccaaacttatacattgttgtaattatgattccacaactcaaagtttcattgctttattatttccaatagtttgcttacatacctgtctgcataatttattgaaaactctccatgatacatattaggcagaatttgtataaaactaccctgtaatttttcatgaataagcttagcagatttttttattgagttattttccttctctcccacaaaaatccagacaattgcttcgcaatccctaataccatcttttaaagaatatacagagttttcctgcaaaaatgaaatcatatcactctttgtaattgcacaagtatctttgtaatactcatcaaacaaattcgattttattcgcaatgatttgaattgtaattttgaaaaccacttatactttatcaagttataacaactgccaaacgccggtttaatcatagaatatgtaaattttgaaggtatcacaagtgcactttccacgattgcatacttacatatattcttatgttgagataaaatctcaagcaaaatctgccctccaagtgataatcctccaatcaatagaactgaaccacctaatttattatttataaattctataatttccgaagaattattctctatcgttgtaaatggtttatcacagcctgcatgaccatctattataggtataattacatgataatccatttgcaatctttcagcagcttctttataattccaccatgacaaaccgcctccgtgcaagaggacaattacatcactattttcttttccgtattctatataattcaacctctttcacctcgcttaaaaatccatattcaattttatgctttccttatcggatgtcttataaccgttttccatttttccggagcaacctttcttgcatcagacatgtaaatctcatggtgcaaccgttcctcgctcatatcgtttacatagccattctgttccacataatcatccattaatgcaacagttgccggttcatcatcaaacggtccaaagtgcataatctgaacacacaatccctcatcaatcgtaagatattccgctgctgaacaatccaattttttctttttcgttgctgtttcaactgcccaatcaaaattctctttcgtaacaaaatctggtaatcgaataaccgaaatccaattgaaagcatctttatttgcataatccacaccatggacatcgtcttgccaccagaaaccttccagtggcggtacaacatattcaaaaaatccttcaatcttatactctgtcttgtaactcatttttaatgtgtatgcaacagcatataacacgctaattgccttttgatatgctccaccttcttcattcggatttcctttacctctgacagcaatatagttagcttttggtacatttacaattgctggtttgttcttcggcatataaaattctttgtattctttcttaaaatcaaacgccatatttgctctcccaactttctttcgtcataaaattcgtatggccaaccctgatttcattcatcaaaggtactggaacttcattgcaagtatgatgataaacaaaacccactttctcctgaacacgttttgatttgttatttccatcatagtagccgcaccaaatcgttgtcataccaagagtttcaaaaccatgacgcaaaagagtttttaccgcttctggcatataacctcttccccagaatggcttcccaagccaatagcccagttcacattcatcatctctttcagtcatatctgtgtgtccgttcaatttaagttcaactgcgccaatcgctctatcactccctttttcgcagatggcatagcactcagcaccagtaaaaacattctttataacacttaaactttcattaatatctttgtgtggcggccatccggcgatcggaccaacctcagggtctttcgcatattcatacaaactttctgcatcagattctacccaatgacgcaatatcaatctatttgtttctaacatcgtataatctccccttgttcttttccttgattatagctcatccgttcatactctacaattgcaaatttgcaatttctcatcctatacccattgccaaattgcaatcgccgtgaatatccagggtactttaaaaattcgtgttatcctcgccttatcaaaagagcagaaattgctctcgcaccttgacaattagagaaaccggaatcagcggtaacatacaacgaaaacaagttttcgttgttggcgtttgtgatttcactcttgcaagcaagtgaaatcactgcactgtataatgacactcacatctaataggtgaaactccttggggtggctcggcaaccaacggcgagttatggattcatccataagaggaacgtgaaaaaccgttcaccaaagaaaccggaatctcggctcaatcgataaagctgcaaatgggacttgcaacaataggaacaggatttcatatattgaatcaagaatgccccggcattcttgggcgagatgtgcactgcggtagcagtatctacctctgcacatctctgccatccgccggaggcataatcgagagacaccgtctctcgaattataaggcagaggggatgtgataacacttgagtaaaccaacctattatctttggaaaaacgatttttcatcaacagaagaatatgaaacagcaaaagataaatataggaaactgggatttcgagttgtcacatatctggatggacagaatgataagaatattcacgatggattaaaggcggttattaagaatcactttcacgatacctatgagccatgccggatgtaaataatatacgtcactgggagcttgctcacgagtgttcgtatattatttgcagacgatagggcgatgcccgtgaccgagatgaaacgaagtggaatcgaggttgcatggctatagcacctttcgattttcaaaaattatatttattatttacattattcatgttaatatatttcatatacagaaaggaagtgagtctatgaacgctggatatgtacgtctatcaagagatgatgacaaacgaaactacgtttctatcgaaaatcagaaattaattattaaccaatttgcggcagaaaataacatggtgatcgaccgctggtatgaagatgatggagtatctggatataaatttgaccgtccaggcttcaatcaattaatggaagatttagataaagatattgacctcgtgtttgtcaaagatttttcccgactcgggcgtcacaatgccaaagtgcttcttcttctcgatgattttcaggaacgtggaaaacaactgattgtcatagatgataattatgattctatgcaggcagatgatgatacgattggtattaaaacatggtataatgagagatatgtaaaagacaccagtaaaaaaatcaaacgtgctcttggagctcgtcaaaaagagggaacacttatgacacagccgccatttggatataaacgaaatgaaaaagacaaatccatcatagaaatcgtaccgaaagaagcggaatatgtaaaaatggtctatgacctatacttaaaaggttccggctatcgtatgattgccaactatctgacagaaaacaaagttccgacgccttccatggttcgccacgaacgagaacttgaagaaggcaaagttaccaaacgtcagattgcaacagaatggtctgattctatggtaaaagatatgcttggaaatgatttttatattggtacacttcgtttgcgtaaacgtgcacgttctaccgttcatggaaaagacaagcgtgtgccaaaggatgaacagtatgcttttgaaaatcatcaccctgctatcattgataaagcttcttttgatctgattcaggaaatgaaagaaaaacgtgtaaagaacaattatcgtggaagtcgtggacaatggattggttccgaaataccaaatccatttggaagttgtctgttctgcaaagattgtggaagtcgtttgactccaattaagagaaccacttccagcagagaacgtaaatattatatctgcactacctacaacaccaaaggcaagcgccattgctcaaaagcacatttaatcgaagaaaatgatttgatgggagatgttgtaacttatatcagcctgtgtcgcaatgctttgtcagaagtcattgcaacctatgatatgaaagattttgattctgagaaaataacacttgaagaaaaacgtactgaaattcaaaacaatatatcagaacgcaaaaaacagttaaaagttcttttcacacagaaagtcagagatttatccaatgctcatggtaatgaagatatcgtaaatgaaacttacgatgctctgcagcaggatattctttcccagattcatggattggaactgcagctaaaagaattaaatgatatcagtcttgagaataaagatgtaaaagaaaaactggaaaatgcattgcaggtcgtagataaaatcattgaaaaaggaattcttgaccgtaaagatatcgaaatcttaattgagcgaatcgaagtggatgaagaaggccttccggaaatcgaattaaaatatggtctgtccggactgattcagtatagtccggcacaggaaatgaatcgtcgtgaaaacgaaatcatttaccagaccatgcgactcatatatgaagaagaacgtgggtttacctctgcaaaatatttatcaaaagcactgactgatttgggttatccaaagtcaaagaagagtgtattgccttatattggacttatgatggatatgggaatcgtagaatcaagcgataactcattgaaaccatacacgattgtgaaaagcaaggaagaattacaggagattatgaaccacttcttttgtgaaaaccttactgataacacgacaggctctatatatgacccaaatttacatggatatggtggcgacaggcggtatgccggaaatggtttttgagtatattctgaaacaaaacggacttgacccgcagaaggatctttccattgatcagagtattgatttcggttctacggcagcagcttttgcaggggatgactctgcggattttacagtagagtttgagccttctgctacagctctggaaaaggagggaaccggtcatgtggttgcttcgcttggggtggagtccggatatgtgccttatacttcttacagcgcaaaaaccagctatctgaaagagtatccggatgtaatacagaagtttacaaatggtcttcagatgggaatggagtttgtgcgggagcatacaccggaggagatcgcgcaggtgatcgcgtctcagtttccggaaaccgatatggaaacgcttacaactattgtaaaacgttatcatgaacaggatacctggaaagaaaatcttatatttgaaaaggaaagctttgagcttttgcaggatattctggaggatgcaggggaactaagcaggagaatgccctatgaaaagcttgttacagtggaatatgcggaaaaagcagcagaatgacagaaatctgcgatttttgatattgacactttttttctcctgtgacactattaaataagaaaacggaaggagaaaaaatatgtcggacaaaagacaatgcggtgtgctgctgcctgtcagcagcctgccgtcaaaatatggaatcggatgtttttcaaaaagcgcctatgattttgtagacgcattgaaggcggcaggacagagctgctggcagattctgcctctgggtcctaccagctatggtgattcgccctatcagtcattttccacctttgcaggcaatccttattttatcagtctggaagacctgatcgaagagggagttctcacgcaaaaggagtgtgacgcagtggattttggcagtgatcctgccagtgtggattatgcgaagctgtataagggccggattattcttcttcgaaaggcttatgagcgcagtaatgtgggggaaaacgaggaattcagacgctttcaggaagaagaagcctggtggctgaaggactatgcgctttttatggctgtgaagcagagatttgagggaaagccctggagtgaatgggcggaggatatccgcctcagatggcagaatgctctggattattacagacgtgagctgtactttgaaattgaatttcaggagtatatgcagtttaaattcaggcagcagtggatgaagctgaaagcctatgccaataaacagggaattgagatcattggagatattcccatttatgttgccatggacagtgcagatacctgggcaaacccgtggctgtttaagctggatgaaaataattgccccacacaggttgccggttgtcctccggacggtttttcagcaacgggacagctttgggggaatcccctttataactgggaggtgcacagaaactccggatttgagtggtggatcaaacggatcgaaaactgtttccgcctttatgatgtagtaagaatcgaccatttccgtggatttgatgagtattatgcaattccttatgggaataaaactgcggaacacggatggtgggaaaaaggaccgggcattgatttgttccgggcagtttctgtaaggctgggggcaagaaagattattgcggaagatctgggatatatgacagattctgtgaagcgtcttgtagaggaaagcggctatcccaatatgaaggttattgagtttgcttttgatgaaagagacacaggaaatgcaagcgattaccttcctcataattatccggaaaactgcgtggtttatacaggtacacatgacaacgaaacgctattgtcctggttccgggatattacgcccaaagaacgcagacaggtaagagaatatctgaataatttttacggttcagaccgggaaatctgtcaggatctgatctgtcttgttatgagaagtgtggcaaagctctgtgtaattcccatgcaggactatctgtatctggacaattccgcccggatgaaccagccttccacactgggaaataactggaagtggagactgatcccgggacagtttacagaaaaccttcaaaaagaaatgaaagtgcttgcaaaaagatacggcaggcagtaggatgcggtgcaaaaaaagcctacggaatgttccgaaggctttttaccgtaagcagataacgggaatcgaacccgcctccccagcttgggaagctggtgttctaccgatgaactatatctgcatgaatttattatagcaccggagtttttttgattcaagaaaaattcagaaaatactttgagaaaagttgggttttgttactgggcacaggttacatcctgcgagatgttttggctctgcatataaaagtcccggggcatacagggaaaaattccattaccgaaggtgactcagaatgcattttgattcatacttcagacaatttaaaagtattgtcctgtatgggagcttgcaggcagaaggcggatatgatcagaagagtatccggaaatacctgaaaatgaaagggagagaaaatgaaaaaggaagtgaatcatgccatacggaaacggtttaatgaagtgatctatcatgttgcgcgttatatggaaattttgctgtctgttgtgattctgggagtgatcgcactggtcggtatccggttggtctgtgatgtgacgagcagagaaatcctcagtatgaatgtggatttctttacggaatttcttgcaaatgcgctgtctcttgttgttggagtggagtttgtaaaatgctctgcagacattctgctcagaccgttgtggaggttcttatgtttgcaacagcaaggcagatggtagtagagcatctgagaacctgggagacgctgataggagtgatcgccattgggattttatttgcgatccgcaagtttctgatgacagaagtagacgacatggtgtaccatgagagaaataaaagaaaagaggaaaaacaatcatgaaaataggatttatcggatgcggaaacatggcttcagctatgatcggcggaattttgaaaaagggaattgtaaaaaaagaagagatcattgtgtctaatcttacagaggcagggtcaagacggagccgtgaaaagctgggtgtggagacaactatggacaaccgtcaggtggttacacaggcagaaattgtatttcttgcagtaaagccacagttttatgaagaggttctcacagagatcaaagatcttttgacagaaaagcatattctggtgggaattgccccgggtaaaacactgaaatggttggaagatacctgtggctgcccagtaaaaacagtacgtctgatgccaaatactccggctcaggtgggcgcaggcatgacagcaggctgctgcaacgaccgggtaacggaggaggaagcgcagaagatcagagagattgcagaaagctttggaagatttgaatttattccagagagactgatggatgcgttcagcgcagtatgcggatgttcaccggcttatgtatttatgtttattgaggcgatggcagacgctgcagttgctcaggggcttccaagaagtcaggcgtattcttttgcggcgcaggcagtgatgggaagcgcaaaaatggtactggaaacaggaaggcatcctgctgaactgaaagacatggtatgctctccggcgggaagtaccattgagggagttcggattctggaagataagggaatgagaagcgctgtgtttgaggctcttacaggggcggcagaaaaaggaaaacgtctgtaaaataaaatatcaggatttattttttgtaaaattgtgttaaagaacagaatgtgctaaactatttcctgtaagggaggtttagcacatgttttttattcagaaacttcttgaacagtctatgaggatggaaaatagcaggaagctggcaatacggattgtggggaagcttctggggatcattccggtattttgcagcagatatctggaaaaaaggctgacaagcggaaagtggaatcctgcaaaaaagtggagaaaagcgcggccgtgtataaagagaaggcgcagaagaaaaaataactgtccataaaaagaggaggattatttttctgtaagaccgcggcttaaagtactgttgtggtatctgacagagaaggtaacatcttcaccgaaccagtcaggaggacagtaggattctgcttcttcctgagagggaaattctacttcagccagaagaagcccttcgtattcctgatgaaacacatcaagctcaatagtcagcctgtttttttccgggataaggtatctcgtttttgagattacaagtccgtcagccttgggtttcaggtgaagataggcatctttagtcagaggaagattgtattcttcccgtgtcatgaatccctttgatttataagtaagataatattcgtcgtcctgtctgcggatgcgtacaaccggttcggtacagaggtagccctgctcaatttcatgacagggatattgtgccaggttatcgggaaaccggtctttttttataagaaattttctttctatttccataacatactccttttgcttaaatgaaaaataactgtaaacgggaaagcttaaatcattgtaacaatttcttctgtttgtttctgtgcggcgggtaaattgctcattttcctgttttatactccaataaagctgcgcgcagttttatgatatgtgttttgatattttcagccggggtcaataatctgtattattatatcatggggagagctttccgtcacgtgattttgctgatgttcaacggactataagtaaccagcgcagccgcctgcaggtaatattccgcaaggtatttttggctgtttttgacaaaaatatatatacaggacaaaatgcattccagattgttttcgtaaagggagatagccgaacaatatttcttgtatgccggtggaaaaaagtggtatacttacatacatatggaaagggacatgaaccctgacagacgggaggatttatttatgagcagagtatatatttttctggcagacggatttgaggatattgaaggactgactgttgtggatcttatgagaagagcgggaattgaggcggttacagtttctattaaggaaacaagggagattacgacttcacatgggattgagatgaaaacggatcgtgttttttcagaaacagatttttcagatgcagatatgctggtacttccgggaggaatgccgggaacaaaatatctgggtgagcatcagccccttacaggccttctcacagagtattatgcaaaaggcggaaaggttgcagccatctgcgcagccccaagtgtttttgcaaagctgggatttctgaaaaacagaaaggcgacctcctatccttcttttatggatcagcttgacggagctgaaacctgtgaggatcctgttgttgtagacggaaatgtgactaccagccgcggccttggaactgcggttccttttgctctcagcctgatcgcgcagcttatgggagaggaaaaggcgcaggaaatcgcagaatccattgtatacaggggatagaggtctataagggaacataaaactgaaaaaaactctggtgtttttatgtcagttgtgctatacttcgataatgactgtaattgtatctttttttaagaggatacacttgcctgaaatgctgaaacacaggcaaaaatagagtaaattttaaaaatagaatcagaacctgacaagtttaaggaggaacaggaaacatgagtttacaggtagaaaaaatggaaaaaaacatggcgaaacttacaattgaggtttccgctgaagaattagacaaggcaatgcagaatgcatacctgaaagcaagaggcaaaatctccattccgggattccgtaaaggcaaagctccgagaaaaatgatcgagcagatgtacggaaaaggaattttccttgaggacgctgcaaacgctctgattccggaacactacagcaaagctcttgaggagtgcgaccttgagattgtttcccagccggagattgacgtaactcaggctgagccgggaaaagctttcatcttcacagcagaagtagctgtaaaaccggaagtaacacttggcgagtacaagggtgttgaggttccgaagtctgagacagaagtaacagacgaggacattgatgctgagatcaaaaaagagcaggagaaaaactccagaactgtaactgttgaggatcgcggagcagagaacggcgatatcacaacaatcgactttgagggatttgtagacggcgttgcttttgaaggcggcaaaggaacagattatccgctgacacttggttccggttcctttattccgggattcgaggatcagcttgtaggcgctaaagcaggcgatcacgtagaagtaaacgtaactttccctgaggaatatcaggcagcagagcttgcaggcaaagcagcagtattccagtgcgatgtgaagaaagtagaaacaaaagagcttccggagcttgatgacgatttcgctcaggacgtttccgagtttgacactcttgcagagtacagagaggacgttaagaaaaaccttacagagaaaaaagaaaaagaagcacgcgcagcaaaagaaaatgcagcagtagataaagcaattgagaacgctgagatggaaattccggacgctatgctcaacacacaggttcgtcagatgatgaatgattttgcatccagaatgcagtctcagggtctgactatggagcagtacttccagttcacaggaatgacagcagagaagatgcaggaagagatgaaaccgcaggctctgaagagaatccagacaagacttgttcttgaaaagatcgcagagactgagaacattgaggtttctgaggacgaagtaaacgaagaaatcagcaagatggctgaaatgtacaaaatggaagctgacaaattaaaagagcttcttggagaccgtgaattagagcagatgaagaaagacatggctgtacagaaagcagttactcttgtagcagacgaggcaagggaagcgtaaaaagcgcaagcggacatcttttgaatccactgtgacgcgacgaatggaggcatatatatgagtttagtaccttatgtcattgagcagacaagcaggggagagagaagctacgacatttattcaagacttctgaaagacaggattatttttctgggtgaggaagtgaatgacgtaagcgccagtatcatagtggcacagcttctgtttctggaagcagaggatccgggcaaggatattcagctttatatcaacagtccgggaggttctgttaccgcaggtatggcaatttacgacaccatgaaatacattaagtgcgatgtatccaccatctgccttggaatggcagccagcatgggcgcattccttctggcaggaggaacaaagggcaagagatttgctcttccgcactctaccattatgattcaccagccgtccggcggcgctcagggtcaggctacagaaatccagattgtggcagatcacatcgctcagacaaagcgcaccttaaatgaaatgctggctgagaatacaggacagcctcttgaagtggttgaaaaggatacagaccgcgacaattatatgactgcagaagaagcaaaggcatatggtctgattgacggcgttgttgaacataaataaaaaagactaaagagaagactcctttaacagggagtcttgtcttgcttttatctcagcatatcaatatagaaaggaatagagaaatatccatggcagataagataagagaaggaaaggtcagatgctctttttgtaataaatccgaggatcaggtacggaagctgatcgcaggcccggagggagtgttcatctgtgatgaatgcatcggaatctgtgcggagattatggaagaggagctggcccagtatggtccggaggatgattttgacacggatatcaaccttctgaaaccagaggaaatccacaaaatcctggatgattatgtaatcggacaggaggatgcaaaaaaagctctgtctgtggcagtttataatcattataaaagaattaccgcagcaagaaatctggatgtggagcttcagaaaagcaatattctgatgcttggcccaacaggttccggaaaaactcttctggctcagactctggcccgccttctgaacgttccgtttgcaatcgctgatgccaccaccctgacagaagccggatatgtaggagaggatgtggaaaatatccttctgaagatcatccaggcagctgactatgacattgagcgggcacagtacggaatcatttatattgatgagattgacaagatcaccagaaaagctgaaaacgcatccattacccgtgatgtatccggcgagggtgtacagcaggctcttcttaagatccttgagggaactgttgccagcgttccgcctcagggaggaagaaagcatccgcatcaggagtttattcagatagacacaacaaacatcctgtttatctgcggcggcgcctttgacggaatcgaaaagatcattgaggcccgtcaggataccaaagctattgggtttggggccgaggttacggcaaaagaggaaagaaatgtaggcgaagttctgaagcaggtaatgccggaggatttcataaaattcggactgatcccggaatttatcggacgagtgcctattgttgtcactctggacggactggatgaaaaagctctgatccgtatcctccgtgagccgaaaaattctcttaccaaacagtaccacaagctgtttgagctggatggagtagagcttgatttccaggatgaggctctggagctggtggcaaaaaaatctctggaaagaaaaacaggcgccagaggacttcgctccattatggaaacatccctgatggatctgatgtataaggcgccttcagacaatacgatccgtaaggcaattattacaaaagaggctgttgaaggaacaggagagccggagatcatttatggagaagccccggcagcacagccttccgcgagaagaaattcacgttccaggaaaaagggcaaaccggaaacagcctgaggaaggaaatgacagcatatgacgcagccaattaacactttgccggcgatcgcccttcggggaacaacgatcctgccggaaatgatcgttcactttgacataagcagagagcgttccataaaagctgtagaagcggcaatgcttcgcagacaggagatttttctggtgacgcagaaagatccggaaacagagaatcccggaatttcagatctgtacagagtgggcaccattgcatatatcaaacaggtagtaaagcttccccatgatcttctgcgggttctggtagaaggccgggagagagccgagcttttatctcttgttcaggaagaaacgtttctggaagcggaaatatccggttccacgcaggaaggggctcaatatgcagacactgtgcgggaggctatgtacagaggaattcatggtctgtttcatcagtattgtatggaaagcggcaaggtcagccgggagctggcagcccagatcatgaatatcgaaaaccttgaagagctgatgacacagatttccgtaaatatttcccttacctggcagaacaagcagaagcttctggaggccgctactcttgaggaacggtatgaagttcttggagggatccttcagaatgaaattgaagttttcaaggtaggacaggatcttcagaaaaaactgaagctcagggttgataaaaaccagcgggaatatattctgagagaacagttaaagctgatccgtgaggaacttggagaagaaagtgtttccgatatggcggatgagtatgggaaaaaactggaacagctggatgctcctgcggaagtaaaggaaaagcttacaaaggagatcagccgttaccgctccatgagcggcagctcggcagaaagtcctgtacttggaacttatattgaaacacttctggcgcttccctggaacagccgttctgaggattctgatgatctggcagaagcatggaaaatccttgaagaagggcattacggactgaaagaggtcaaagaaaggatcatggaatttctttctgtgagaaagctgacaaagggcggaaaaagtcctatcctctgtctggtaggacctccgggaaccggtaagacttccattgcgaagtcggtggcagaggctcttcacaaaaaatatgtccgcatctgtctgggcggtgtccgggatgaagctgagatcagagggcatagaagaacctatgtaggtgccatgccgggaaggatcacggcggctctgcagcaggcaggagtcagcaatcctctgatgctactggatgaaatagacaagaccggaagcgaccacagaggcgatacagcttcagcgcttctggaggttcttgatccggagcagaacagccgctttaatgatcattacgtggaagtgccacaggatctttccgaggttctatttattgccacagccaatgatattcaggagattccacgtccccttcttgaccgtatggaggttctggagatttccggctatacggaaaatgaaaaagaacatattgcaaaggatcacctgattccaaagcagatggaggtcaacggacttccaaagggaagtctgtcgatacagacgccagctcttcggaaaatcattaatctttataccaaagaagccggagtccggtctctggaaagaaagatcgcgcagatctgccgcagggcagcccgtgagatcatggaaaacggacaggacaaggtaaaggtcaccacaaagaatctggataagttcctgggaaaaagccgttattcctatatgatggcaaataaaaaggatgagatcggtattgcaagaggccttgcatggacacaggtcggcggcgatacgctgcagatagaggtcaatgtgatgcctggaaagggcgagctggctcttactggacagctgggagatgtgatgaaggaatccgcgcaggcaggtatttcctttatccgttccattgcagaccagtataagataggaccggagtttttccaggaaaacgacattcatgtacatattccggagggagcagttccaaaggacggtccctcagccggaatcaccatggccacagccatgctgtctgcgattatcaaaaagccagtaagagcagacgtggcaatgacaggagaaattactttgagaggccgtgtgcttcctattggcgggctgaaggagaagcttctggcagccagatatgcaaaaataaaagaagtccttgttccggcagaaaacagagtggatgtggaagagctggatcaggagatccttgacggtctgaagatttcttttgtagataccatgacagatgtgcttcaccgagcgctgagtaaataacaagatcccgggtccgtgaaaggagccggacaggagaggaaacaaatggttataaaacaggcggaattagatattgtttgcggtattaccagcaaacttcctgatacgggaatgccggaagtggcgtttgccggaaaatccaatgtggggaaatcctccctgatcaacggtctgatgaaccggaagtctctggcccgcaccagcggacagccgggcaaaacacagaccatcaacttttataagatcaatggcgaaaggtacctggtagaccttcccggatatggatatgcccgggtatctcaggcggaaaaagaaaaatggggaaagatgattgagaagtatcttcatacttcaaaaaatctgaaagcagtgtttcttctgatcgatattcgtcatgagccgtctgccaatgactgtcagatgtacgaatggattctccataacggctatgagccgatcatcatagccaccaaactggataaattaaaaagaagtcagatccagaagcatctgaaaatgataaaagaaggacttcagctgaaaaaaggaagcacagtgattcctttttccgctgaaaccaagcagggaagagacgaaatctgggaagtgatcgaatctcttacagacggcaaagagccttctgaggaagtctgaaaggatacggatatgggaatcatcaaagcattgaaactgggatttgattattttaaatatgatgacgacggaaacatacaggagactcagagagctgtggacgaagtgagcgtggatattcaggaaggtgagtttgtggctgttctgggacataacggatccggaaaatccacatttgccaagcatattaacgcactgcttcttcctacggagggaactatatggatcgataacatggataccatgaaggagccggagctgtggaagatccggcagaaagcaggaatggtatttcagaatcctgataatcagatcattggaactgttgtggaggaagacgtgggattcggaccggaaaatatggggattcccacagaagatatctggaaacgggtagatgaaagtcttcagaaaaccggaatggcagcatatcgccaccattcgcccaacaagctttccggcggacagaagcagagggttgccattgcaggagtcatggcaatgcgtccaagatgtattgtacttgacgaacctacagccatgctggatccaaacggcaggaaagaggttctggaagcagtgcatcagctgaacagacaggaaaaagtaacagtagttctgatcactcactacatggaggaagtcattgacgcagaccatgtatatgttatggacgagggccatgtagtaatggagggaactccaggagagattttctcccaggtggacatgctgaaaaaatacagactggacgtacctcaggtaacgctccttgcccatgaactgaaaaaatccggggtggatattccggatggaatccttactacggaagagctggtgaattgcttatgtcaatagaattaaaaaatatcacatacacctacagtccgggaactgcctatgagatccatgcgctgaaggatattaatctggaaattccggacggacagtttatcggagtgatcggtcatactggaagtggaaaatccacactgatccagcatctgaatgctctgatccgccctacatccggctctgttctctacaatggggaagatgtttgggaagaaaaatatgacaggcggaagttaagaagtcaggttggcctggtatttcagtatccggagcatcagctttttgagagcgatgtgctttctgacgtgtgttttggccccatgaatcagggaatgagccgtgaagaagcagaggctgaagcaaaaaaagcgcttcttcaggttggatttaaagaaaaaaatttcagtaaatcgccttttgaactttccggaggtcagaaaaaaagagttgccattgcaggcgttcttgccatgaatcccaaaatcctgatcctggatgagcctacagccggacttgatcccaaaggccgggacgagatcctggatcagatatcagagcttcataaggctcgtggaatcaccatcattcttgtatcccacagcatggaagacgtggcaaaatatgtagagcgtctgatcgtggtaaaccgtggacagattgcctttgacgatactccaagagaggtgttcagccattatcaggagctggaggctatgggactggcagcgcctcagattacctatattatgcatgccctgaaacagaaagggctgaaagtagatcccaatgcgacaactgtggaggaggcgagggacgatattctcagagcgctgaaagaagcaggctctcctcttttgaagggaggaaatgagaaatgatcagagacattacgattggccagtattatcctgcggattcccctcttcataaactggatcccaggacaaagctgatgggaacccttgtttttattatttctgtgttcctgttcaatacgattccggggtatgcagtggcaacagtatttctggctgctgtaataaaaatatcaaaggttcctgtaaaatttatttttaagggtctgaaagcaattttcattatcctgatcatcaccatggtgtttaatgtatttctgacaccaggtgaggtgctctggagttttggtttccttaaagccacaagagagggaatttcactggccggaaagatggcgatccgtctgatctacctggtgatcggttcttctcttatgacgctgaccacaacgccaaatcagcttacagacggtctggagagaggtctgcgtcctctgaataagattcatgtgccggttcatgaaattgcaatgatgatgtccattgcccttcggtttattcccatacttctggaggaaacagacaagatcatgaaggcgcagatcgcaagaggagcagattttgagaatggaaatctggtccagaaggtgaaaaatatggttcctcttctggtgcctctgtttatctccgcatttcgccgggcaaatgatcttgctatggcaatggaagcaagatgctatcacggaggagatcagagaactcagatgaaacctcttcattatgaaaaaagagatcatgtaacctatatgatactggctttgtatcttgcagttgcaatcggatttcgggtggcaggaatatgaaaagagtaggacttgtagttgcctatgacggcacaaattactgcggctggcagatccagccaaatggaatcactatccagggagttctcaatgatacattgtcagaacttcttggtgaaaaaatagaaaccataggagcaagccgcacagacgcaggagtacatgcccttgggaatgttgctgtgttcgacacaaacacaaaaattcccggagaaaaaatttcctatgcgctgaatcagaggcttccggaggacatccgcatacagctttccgaggaagtagaaccggattttcacccaagatactgtgacagtgaaaaaacttatgagtacaggatcctcaacaggaaattccccgtgcctacagaaagactttattcttatttttatcattataagcttgatgtggaaaaaatgagagaagctacctcttatctgattgggcgtcatgattttgcaagcttctgtggtacaggagcccaggtaaaatcaacagtccggacagtgacgggaattgatgtatggagggacggagatattgttactatccgtgtttccggggaaggatttctgtacaatatggtaagaattattgcaggaactctgatacaggtgggaaacggacagtatccgccggagagagtccgcgagattcttaatgcctgcgaccgttctgtttccggccctacagcgccggctcacggactgactcttatgggaattgaattttttgattcataaaaatgaaagatcatttacacttatatgcaatgatagtgacagttccttttccgggatagcgcttcattgcatatttttctggaaaagcttcaataagatcaggaagcttcataaagccgtaggtgcgggcgtcaaagtccggttttgcacgtttgatatactgaccggcagagctgacattgacatagcggtcatcatcctgatatttatcccaggcaattttcagaagcttgtgaatatcccgcagctcgtcggtatttgactgttcttccggatcgctgccagcagtttcttttcgtccgtttgttttgctttccgatctggaagaagagatttctgaggatttgctcatgttttccaggaatagaaattcatcgcaggcattgcgaaaagcagagggagttttcttctcgcctacgcccattacatacacgccggattcatggagccggatagcaagaggggtgtagtcgctgtcgctggcaacgatcacaaaagcgtcatagatttctttgtggagcagatcaagagtgtcaatgaccagcgccatatccgtggcgtttttgccggaaacatagtcaaactgctgctctgctttgatggcaagtcttttcagttcatcttcccagtttttcagagcttcttttctccagtttccgtaggctctttttacaacaatacgtccataagcagagagttcctgtattacagtttccagtttggaaagctgagtgttgtctgcatcgatcagcagagcgattttttcaagattcttcataatgggctattctcctgtttaaaattctgtcataaaagctgaaatggatatgtcctgaaaacagatagttttctgtatagatttatatatgcaatatagcattttttcggttaaaagtaaatatttctggaattttatcatagaatgtgttagaatcgagggaatgaaacaggagtaggagatggaaatatgattcagttttttgcttcgatttttattaaaaacaggcaggattacagttctccggcagtgagacaggcatacgggactctctgcggtgctgtggggatcgggctaaatatcctgctttttctgggaaaatggatggccggatttttgagcggttccatagccattactgcagatgcatttaacaacctttctgatgcgggctcctcaatcataaccctgatcggtttccggatctccggacagagaccagatccggaacatcctttcggacacggaagaatggagtatatttcaggacttctggtatcagttgccatacttgttatgggatttgagcttgtaaagtcttccatagaaaagctgatccatccggagccggtagaaagcagccctgtgatcataggtattttggctgtgtccattctggtaaaggtatatatgttttattataaccgggccgtagggaaaaaaatagaaagcgctgcaatgaaagcgactgcaatggacagtttaagcgacaccgtttccacagcccttgttctggcggctacggtgatcagccagtttacaggacttcttctggatggatggtttggtattctggtgggactgtttattctgtatacaggggcctctaccataaaggaaaccatggatcttcttctggggcagccgccaaaggaagaatttattgaagagatcagagatattgttacctctcataaactggtatatggaatccatgacctgatcgtccacgattatggtccgggccgtctgatgatctcacttcatgcggaagtagatgcagagggggatattcaggaaatccatgaacagattgaccacattgagaatgaactgcaggaaaaacttcactgctctgcaacgatccacatggatcccattgttacagatgataaggaaatactggatatgcaggaaaaggtgagaacagttgtgaagacaacagacgaatctttcagtatgcatgatttccgaatggtaaagggatctaccaatacaaatctgatttttgatgtgtctgtgccaagctgctgtcagaagacagataatgaaattatgaataacctgaaagaaaaaattaaagaactgcccggaggccagtattctccggtgattcagattgatcatgagtattactgacagaaagaggcagggtataattggtttgaaaagtatatgataatttataatcaggtacaactgcatagaactgtactgagaaaaggactgtctgtttttgacagcccttttctcttatataatcaacagaaatttatattttctcagggcttttttgagggagactatcacggtattctctgggtgtcattcccgtgtattgtttaaatactttgctgaaataccggggattgtcgtatccggccatatcacagatttcaattatttttttatcggagctaagaagaagttcttttactttttccattcgtacttctgtaagatattcaatgaaattatgtcctgttttttctttaaaaagacggctcaggtaattgggatggagataaaactgctctgccaggaaattcaggctgatattttcagcatagtgctggcagataaaaagctggatttcccggatgacatccttactcagtgtctgttcatctgatcggttgagcagtgaaataagccattctatataagaagtcatagaatctgcactgcttttatgacttcgtgccagaagaatgtggctgagggtggaattgagttgtgtatgcagttcttcttcgttcagacgaagatctttcagatagctgttcagttcaatcaggaaactgatgcaggcggtctggtactgggtaagggatggcgactgctcaagaagcgaatgcatagccttttctaacaaggggatggcatttatgcgcgtctccggattcgtaagcctgcggaaaatttcagggagaatatcctgaagagactgagaaccggctgaaaaaagctgctcaatattttggtagaggatgatagaatttctggtacctgcacggtgataatgacgtgctctgcgtgcttcctcccagccctcgtggatcttttcaagcccgaatttccggctgctggcaccgcaaaaccattcttcaagaccagagcaaagctgttccagaagagaggtaagggaatcaaaggaagaatctgagtcccagggaagcagaacaaaaagtgaaaatatctcatcatccagaaatatggcagagggaatcagagatgtaagctggtttctcatctgctgtttttttaaatcaatatcctgttggcacaattccttgttttttaaaatcatagaaaatccataccattgtttcagattcggaatatcatatctgtcagagtctatctgagaataacctttggctgaggataatagcagggcttccaggcgattggtgtgaatctgtgattctttttgacggatggcaaattctccgcggagacgttccagaagcacttcaatgtctttcaggacaacaggtttggtcagatagtcgatggcaccattacggatggcctcctgggcataggaaaaatcagagtatccgctcaggattacagctttaactgcaggatattcttttctgagaatcttaagaaggtccagtcctgtcattcccggcatacggatatccataaacacaacatcaatatgtgtttttttgagcagagacagagcttcctctccatcggatgcagttccggccacctgaaaaccatagctgctccattttacaaaacgggtcagtccccggcatacaatttcttcatcatctacgattaatacctgataggtcataagctgtctgtacctcctgtgatgtctgtcatattttcagaatgatttctaaggggaagcaaaatttctatccgggtgccttttccaggagtactggagatttgcagtccataggattccccgtaaaaaagccggatccgctggttgacgtttaccagtccgatactttcgtccggagcttcatctctgttcagagaaagctgaagagagtgaagttcgttttttttcattccccgtccgttatcctccacgagaatatgaaggacattatcgcaggctgaagaatggattctgataaaatatccgctgctggcatctccaaaagcatggacgacggcattttccatgattggctgaagaataaactgcggaatgtaaacagactgatcgtctacctctgtttccaggaacagctgtattttttcgctgtggcggaaattgatcacatccagataaatagaagcatgttcgattccttccctgagtgtgatggtattgcctcctgttttcattcccagacggcagaggcggctgaatttttcaatcatttctgtaaccggactttccccgtctgcttcatacatggcctcccagcggatgatatccagagtattataaagaaaatgtggattgatctgcataagcatagcgtctaactgggcatttttccagctgagctgcagcttctgacggtgaatttctgagagatagacctgatcgatcagctggttggtgttttcagccatttcgttgaaacgatctcccagagcagtgatctcgtcatgtccgctgttctcatatcgggctgtccatttaccgcttcctgtttttttcatgacccggttcagttttttcagtggatctgaaatgctgaaggtaacataataggaaagtataaagcaggcgatcactgtgccgatcaataccaggacacagagattccggatatggtaggagtgtgccagcagtgcatccagactggcaatgtagcaggcaaacatttctgtgtcaggaatctgttcgtaagccagaagaatgttctggcggtccagctgaatctgttcgatactttttcttttttgcagcatttcttcaaaaagttccggaatacgtggaaaagaaggagatttgatgctgggatcaaaccaggtaagtactccgctttttccgatcaggaaaatatttccctggtcgttgtttccggaaggtgtttcgatatcggaaaaggtactgcggtcaatgttaaaaagcagtatgcccagaaaatctctggtatttggctcatatacagcaatttccatggtgatgatatttgcgaaaccatagacaacctgttcatttttataaaaaatccctgtttgttctttgtcgtccatccagacaggatatccccgcttatcctgtggaacaagatagaaatcggacttgtaaaaggcatccagatcccggatagtgccgcctctctgaaagccgttatcctctaccatatggtactggcgggagggagtgacaaactggatgtttacaatatgttttttgttctggcgcaaagaatagagcctgttttcgatcagaaaggtgtttgtctgaaacagctgctcctgaccgggacttctgttttccggcagagcagaattttcggagatagctctgatgatccggctgtcattataaaaattgagcgccatattttcatattcttccatggtatcctgtattttcagccgggtgttctggaccagcatagaggtatagcgggtaaggttcagattgatctctctggaatactggaaaaaggaaaaaaaggtaagaaacagcgctgagataagcaggagtgcaagaaaggaaacattcaggcgtttaaagatacccacctttcggagctgttttgttaccagagaattccatttttgttttgctgtgcggatcatatggatgaatttcatttgggacctccgtaacatgtatgtaaacataatgcatgaattattttttattataacactgtttttgggaaaaagacacaataaaaggagtgcggaccaaccgcactcctttggcatataaaagaaaatggataggatttatttcttattggcttcattaaagctttccagagcctcggtctcacagagcttctgagcatctgcaaattctttttccggatccgcatttggatcagtgaggatcttctggactgcacggtcaacataggagccgaaatctgcttttccgtagaattccaggcgtccaacagtttttgctgcttccagaacatctctgtattcttccgggaaatcatagaaatcagtcacactcatgtcatcacgaggaatgatcaccgggctcagagcgcctttggttgcaaggttttcaaagtaagatgcaaaataatctttggagttatagaagctgatgtattcccatgcagcatcttttttggcctgatctgattttgcgttgatcacataagcagtacctgcaatagcagtagtctgctcaccggaaggtcctgcaggcggcaggcacagtcccagatcatccgggtccataccattggatacagtgtcggcaacccagtcagatgcaaatggcatcatgccgatcttgcccattgcgaaatcagcggtaagatcgccgaatttcagggtcagatcactctggagtacaccctcgctctttaactgctgataatatttggcagcttcgatcacagccggatccgtaaaggtcagttctgctgttccgtcttcgttttcttttgtcagatcgccgcctgcctgccatacataatactggaagaaccattcagtccattcagcagccagagtggcatatccggcaacctgattgtcgggattgttgattttctttgcaaaatccagtgcctcttcccatgtttttggagcagcttccagacctgcctctgcaaagagagccttattatagccaaaaagcatgggagcaactgtagatgggattccataaatattatcgtcttttgtaaacatatccacatattccttggtaaagcttccccattcatcccagctgtcggtataggcattcagtggctccaggattcctgctgcaatataagaatccatcatggtaaaggagcagtttaccagatcaggagcagttccggaggcaacgccctgataaaattcatttcccggatctccttctttgacaactttgtttaatgtgatccatggatgctcttccaggaatttttcttccatggaaagataccagtcatcctgattacggcttgttacccagatggtaagttcaaccggttcgtgctcttctgctgcagaaacaacagcagctccggccagagttgtggctgtcatggaaagcgtgagcagtgtggccagtagtttcttcttcatcataatgaaatcctcctttttatccggtccattgatcttgtgccggtattttgtcctgaactaatcataacagattacaaggattctgaaaatagaataaatttaaccatatttcatagaaatgtcactttttttaaggtgtcttccaggaaaaaatgaagaggttaaaaaaggtgacataaaagtaagctatgtatattttcctgaaaagtaattttttttatactttatcttaacaggattatgcagaaaatggaggtatggaaaatgagtgcaaaaatgagtacgaaaaagaaaaaatcctttaccgcaaagccgggaagctatacattccgtaaaaaagtaacaccctggtgtattttatttctccctatggcttttacggtctggctgaaatattatccgattttcagtgctttttatatttcactttttaaatatgaccccataaatcccccgggaagattcgtggggctgaaaaattacctggaaatgttccagatgcagttttactgggagtcctggaaaaatacatttatttttctgctccttcagttgtgcatgtgtttttttatccctttgatccaggcgcttctgcttaatgagctgatcaggctgcagaaatgcctgaccactctttatatccttccggcgctgattccgacttcagtaaatgtgatcatctggaggtggatatggcatccggattatggcgtggcaaatcagatcgtaaaattctttggcggagagccgcaggtatggctcagtgatccggatctggtcaaattctgtattatctttccaggggtactgggcggaggactgacagtgcttctttatctgtctgcgattcagggggtatctacagacattatggaatcggcagctctggacggatgtaccggatttaaaaaaatcagacatattattcttccgaatatttcttttatgatctttatccagttgatcatgtgtgtgatcactaccatgcagcttctggatgctccatacatgtatgcgtccggaggacccagcggagcttctaccacacaaggtatttttatctataatgcatttaatgatgatctgaattatggccgtggttcagctgcttcggtggtacttttgatcgtgatcgcggtactgaccatgcttcagatgcattttgagaagtcagagaagaattaaaggaggcatggacatgaagagaaagaaaaacagaaaaaacagaatccgctgcggaaaatccgaacgctttctgaaaattgctgcagttacagtgtctctgctttttgcagcgctgatgctgtatccgctggtttttgccgtatccagcgccatgaaggataattcccagatttataaggttcctccgaagcttcttccgggaaaggcaaacagcgtatcctttgtgctggattataccgggcaggaatttcaggatgcagaagaaatgaaggatcagatgcttaaggataatgttcttgtaatgtttggaaccaactttaaatttgcagatcagtcgattatggagatacatgtttatggaaccagagaaggcagaactttgttccattcgagagcgcatcagatgaagcttcagatggaatgcgattatggaatttacaaaagaactgcaatcaaaaaagaaatccttcttcatgatgaccgttatgtccgtgcctgtgaatccattggttatgagtttgatgaaaacggaatcgataaagtaccggaagaagggctggcagatgagtttcaggatcagatagcgcctgtgatccaggaaaaatatactacagcaggaacgctggtcagtattggaaacagaaccaaaaaccttctcagtctggaaagcttcaaatattatctggatatgccggcctatatttatccccaaagtgaaagggttgtaaaatacggatttctgacttttgtgatgaacagcgtcatcgtgatcggatttgcaatgatcgcccaggtgatcctgtgttctgtctgtgcattcgtgatcagccgtcagctctctcagagagccggtaaatttgtactgatgtttttcctggggggaatgatgatcccctttgccagtattatgcttccgcagctgatcatgtaccgggaaatgggagcttataataactatgcggctcttttgcttccatttttatatccctatggattttatgtgtatctgtacaagggattttttgatcagatcccgggaagctattttgaagcagccgcgttggacggagccggaagctggtatctttattccagaatatgtatgcccctgtccaagccgattatttctcttattgcgctgcagacatttattggaaactggaatgattttttctgggcatggctggtaacagaggatcagaatctgtggaccttaaatgtggctctttataatatttccaataatgcaggaaccaaacagaatgctctgatggggcttgctgttgtgaccatcacaccagtgatactgttgtctattctgttttccagacagctgaagcagagcattgcggcatcaggagtcaaaggctgacgatgggtgtaataattgaaaaacagaagaatcctgttgctgaaaactggaaaaaaaggtatgataaaatcatagagtcaggagtgtattatggaattaacaggtatggtaaccacaagagaagaatttctctatccggacagtctgtgcggcagacttccggaggaactgcagatcacaatggctggaaatggcagaccagggatccagctgatacttgagaccagtggaaaaaaggtgaactttttcctgaagggaaagggtttttgtggagaatggtatgaaatgaaagacattccggtggaatataataccggagacggagtttctcagggaggcgctatggtgctggaaacaccgccgggagaaaaaccggattatgtgacccgtctggcaccttttcgtgtttatgactgtctttgcaggacagacagcggggagattcccgtaaagaaccggaaggccgcagcgtatctctgccttgtgccggacaaggatctggagccgggagaataccacctgagtcttggggcagaaacagaagaaggcttctgggaaggcggtgtgtccgtaaaggtctgcagcgtgcggattccagaggatgcgtttcccgttacaaactggttttccctggaggcaataagccggttccatcatgtggaaatgggaacaccggagtatctggatatgctgagagtatacatccgcgctatgaggagactgcatcagaaaattttttatattcagctggacgagaaatgcgtaaacaccaaagaaccgattgcttttgactttgagtacttaacaccggtgattcaatgcttttttgaagaaggaatggaaatcatggagattggagcgcttcttcaccgtggatttcttccggacggaagtccggatatgtatacggacagctttacctgtatgatggataaaaatctgaagtttgatacactggaaggttatgttcatacagtgaagctggtacaggcgctggcttcctatctgaaaaagcacggatgggaaaaaaagatcctgttccatatccatgatgagccggatatccatgtaaaggaccgggaggctctggaggcaaggcgccggcagtattatctggctgcaggtatccttcggaaatatcttcctggtgtacagatcatagaagcggttgatactgcggagttttatggaggagtggatatctgggttccgggaacagccggatatgaaaaaaagaaggctgagtttgatcagcttatccgtctgggtgaaactgtgtggacttatgtctgctgcgggccggagggagaatggcttaatcgttttctggattttcatctgatacgtggaaggcttctgttctggggctgtgccagaaacaggatttccggattcctccactggggatttaaccagtttccgggaggaatggatccattcaaaggaaccagctgtccgaatgatacaggaataggaactgcctttccctgtggtgattcttttctggtgtatccgggaaaagaggaaccggagatcagtatgcgtctggaagcacagcgaagaggagcagaggatgcggcactttggggactgctcctgaaaaaagatccgcagcttcatgaccggctgctggatcagatgtttacgaataatcatacatacagcagggatccggagaaacttgaccgggtttatgcacagcttctggaaagtctggaaaaatacagctgaccggaagaccggcagaaaacagacaggagagagcatgagcggcagaaaaaagaaacggacattaaaaagagagatcacactgctgacgatggcaacatcttttggcgcgctggttctttttggaacagtgatgatcgtgatgttttttgtgttttttctggggaatatcagggaggatatggaaaatatcctccagaatacccttcagaactatcagtcaaaaatgcagtttattcaggacggggcagtgatgatccgccacaattccacactgcaggatttttttgacgcagactggacagacagggcagaaatggaaaaacagctttcctacagtatggaattattttccaatcggaatatgacagaaggacagagtccttttgtgaccagtgtgtgtctgtttaataaaaaggatgagtatgtcagggagcattattatccaatgactgtttccgcaggacgaaacaaggagatcggttatctggaaatgatgcgtgagttccgtcaaacagaagaaaggtatcggatgacgtcaggggctgatgagatcaacctctgttttcgtgtttatggagatggcatggaagagctggggatttgcgttcttggaatcgcaaaagagggcatccgggatatttttgcccagataggaacctacagtcatggaaactggattgtcagcgaccagcaaaaaaatatcctgatctccgcaggggcggagcagacagccggagagctgaaccatctggaactgaatgccgtgggagaaaaaagaatcgcaggaatcaggactctttatgcgtctatgggaacaggatttggtacctgcgcggcggtatctgtgggaatggataatatttatgtgattctgaaacctactatggttactttttttgcagtggtctttctggctcttatatttattggagccatgatgctgggaatcagttttcggtttaccagaccgttaaagactctggcagataatctggaggcatttggaaaaaaggatctggatgttcgtatggaggattcttctatttccgagatccatgagatcagtgtgatctttaatgaaatggcagaaaggatccagtatctcatcgagcaggtctatgagaaacagcttcttgcagcccggtcgcagaccaagtatctgcaggcacagatcaatcctcatttccagtttaatatccttgccatgttcagcatccgtgccagacttgccggagatgaggagctgtacaggggacttcaggcattttccggactgatgcggggcaaaatattccgggaaaaggaaatccgtattccggtatctcaggaaatggaactggtggatttttatctttatcttcagaaaagccggtttgaagaccagctttcctatgagatcgaatatggaagcgaggatgtgaagaatttcaggattccaaggcttcttattgaaaacctggtggaaaatgcagtgtcccatgggatcgagccaaaaagcggcgggggtatggttcggatccgtctttttgagcaggatgacatgctccatattgtagtggaagacaatggagtagggtatgaggaacgcgcagaagacctggaaatcgatctggaagaagaaacggagcatacccatacaggtcttgccaatatgaaacgactccttgagatcctttatcatgacagatactgtatgaatatcacaggagaaaagaatgtaggaacaagggcagagatcattctgcctgcagaaaggggaagcgtatatgtggaaagtagcagcagctgatgatgaggcgtatctcagaaccgctctgaaaaaactgatgaactgggaaaaaatgggctgtgaactgatccgtgtggtaaacaacggcagagagcttcttcagtgtgtggaagaagaacacccggatattgtgattacggacatccgtatgccggagatcgacggactggaggtatgcagacagctttatgaaaagtacccggaaacccagacaatcatcctgagcgcctatacagactttgaatatgcaagaacagccatccggtatgatgtagcggattatgttctgaagctttcggttctggaagagcttcctcctgcagtggaaaaggtaacccggaagctgcagaaacagaaaaaagaactggaggaggagctggtaaaactgccggagaaaaaagtggcagaaagtctttatgaccaggttcaggaatacattgaaaagaattacagcaaaaagatcacccttaacgatatcgcagaagagcttcatgcaaacagcagttatttaagcaggctttataaaaaagaaagcgggcagaatctttttgatgtgattctgaaaaaaagaatcgaaaaagccaaggtatatatggaaactacggacagaaagatttatgagatctctcagtcggtagggtttgacgatacagggtatttttccagaatctttaaaagatacacgggggtttcccccaaggagtatcaaagtgggaagaggggcgtaaatgaagagtaagaaaaagcttctgagaatttcagggctggcgtttctttctgccatttttctggcaggatgtggagaaaaagcgccggaaccggtagagatcactctgatccacggatgggggactaccgaagaggatcatgtggtcatgcgggatatttatcaggattttgaaaaggaaaatcctgatgtaaagctgaaccagctttctatgccctccggaagcgaaatggtccgtaaggttgaggatatgcttgtggtaggagaaatcccggatctggtatttctgggaggatccggtaaagatacggtatatcagtttatgacggaaaatgatcttgccctcgatctgatgccatatatcagagaagaccgggaatttgcagggaatcttgctcctgtaaatattgatttctggactacgggagaagaacagctttttaccatatcggatgtgcttttgttaagcggaggctactggtatgaccgggagatttttcaggcagcgggggtagaggagcttccggatacctgggaggaatttcttaaggcatgcgatcagatcgatagttgggcaaaagcagaacagaacggtgtagaatgtcttcagatgtcgtcagaggcatacctttattttatggatcatattcttgcggcccaggattttacaaatggaagtgtggctcagaaccatcggctttatctggaggaaaaggctgtgaaagaagctcttgataccctgcggaaaatctatcggtattccagggcaaatggagattacagctatcgggatgaaacagatgcgtttaatgatggaaaaacagctatgtacattaacgggatctggggcgcgcctatgatctcagatcagatagacgctgcctatgcgctgatcccttccggggaaggagaaaaaatatcatgcgagtcggcatgtcttggatatatccttggaaaaacgggagatgaaaaaaagcaggaggcaagcgtccggtttgtgaaatacatgctcagtcagccggtacaggaacggattttgaaagaaacagagcaggttcctgcgaatcctcatatagatatccggaaatatcaaaagaaaatggagcgctttgtacaggcggcagatacggtaaaggaagccggaatcaggatacaggttcccgacaacctgtggagcagcggtgccagagacaattttatggaaggaattgatgatgttctgaaaggagaaatctctgatgaggaatttcttcattctctgaagtaaaaataatccatatttttgtaaaaaagtaaaaataatcctggattgcagtcaatatctttcattcaaaacaaccataaaatgaaataaaataaatgcaagttaagcagaaatgcacaagacggaaaacaaaaactatttcatgttatggagggaaaagaaatgaaaaaaagaactatcagtattcttcttgcaggagcaatgacaatggcagcggttatgggatctactgtgactgcatttgcgggagaagaagacactctggagttttatcacggatactaccatgatgagagcgagtggccggcagcaaaggtaatgagagatatttatgacgagtttgcaaaaactcatgcagacggagaagtaaagtttgagccgatcgctgtagagaacagagatgagatcgtcagtgctgaggtagcaggcggaaacttcccggatatggtagactgcggacttcctctttcactggcagcgatcagccaggggcttgttcttgacctgaaaccatatattgatgaaaacaatcttcaggatgcggtaggtctgaactatacacagaatgatgtggacggtcatatttataccgttcatgaccagctggaaagccgtggactctggtataatacggaagtatttgagcaggcaggtatcacagcagaagaagcgtttaaagactgggaaagctttggagtagctatggataaggtccatgagctgggtggagatacatatggatatgctgcaggacagggatcccgttatatcattaatgcagttcttgcatctacagaagagggcagagagcttcttaaaggagaactgacaccggaagggattgaatccgaagcgtttgcagaagcttttaagacagcagcaaaacttgatcaggcaaacggatccgaccataccacagaagatgttggaaaccttatggatgattttaataaaaacggaaaagcagcagttctctttaatggtgtatggaatgcaagtggaattgatgccggtcttgcagataagattgaatctcagatcttcccgggcaatgtttccgttgtaacagccggatccggtcattccatttctgctaatttaagtgaagcagaaacagaactggcactggaattcctggcatatatggtaagtcctgaggtacaggcaaagatctttaccggtgtacaggcaaatccatgcaataccacacttgacctgaaggcacttgcagaagaaagcggtgatccgatcactcagaaacttgcagaagcatgtacacaggtaaattctgcagaaactgtagtgactgatctgaactatgtatgggggtctgacgtaggaagcgctatcatcaatgcactgatggaatcagcagttgaagggaccgatattgacgcacgttttgagcagttaaagcaggagctgacagcccttgttgcataaaggcggtagtaggaggcggcttcggccgtctcctttttatcatcataaaaagtggaggaaaccgattatgaaaacaaggaatatgagctggaagagaaaaggctttatcctggcctttcttgctcccacagtaattgcatttgtattattttatctttatcctattgtaacagtctttgtgacctctttctgcaaatgggattataccaatattaccagcccggagttttttggatttgcggacatgtggaataactacaaatatatttttgagctgtatccgtatttctgggaagctcttcggaattctactatatgggcgcttctgggagtgtttgtgcagatacctgtttctgctttgatcgctcttgcattttcccgtaaagtaaagggggtaaaatttgcaagaaatgtatatatcatccccagcatgatttcatctgcagccatgggtatgatctttctgcagctgtacagtccgttatacggagtagtgaatccggtgattcgtttatttaaacagaatttttccgaaaatatacttcttctcaagggaccggcatttatcgccatgacctgtgcctatatcttttttacaggaaccactacactgatgatcctgggaaatattatggcagtaccggaagatgtaagagaggcagctatgctggacggcgccagtggtctgaagcaggactggtatatcactattcccatgatcaaggatacgcttcgtacggtatctatcctttcggcaacagcgggcttcctgctttataatgaggtttatttcctgacaaagggagcagcaggaacctacagtatcagttatgtgatccgtgagcttgcaatcacaagtacaagaacacaatttggccgtgcaaatgcggtagcagtgatccagatccttgcaggtatgctgatcattgtatttgtaaatcttctgtacagtcagctttttaaaggaaaaagaatccgaagaaacggaggtcagtcatgaacagaaaaatgaaatccaatccccaggtacgtacaatgtcccggggaacaaagatctttacctatatctgtcttgcatgggcagttctggtggctctgatgcctctggtctggctgttcatctccagtctgaaaaaagacccgctggcaagacccgggtttcagcttccggaatctatctgtctggatggatatatttccactttccgtgatcttcatgttatgagatatttcggaaacagtatgattattgccggtgtatccgtagtcatcagtatcctgatgatctccatgtccgcctatgtagtggcaagaatggaatttaaggggaaaaagctggtgaacttgatgctgtattctactatgttcattccggctacagcccttacctatccggtttacaatctggtaaataaaatgcatatttataataccagaggagccctgatctttatttatgcatgcagcgggctggcagtcagcttttttgtaatcaaaaattattatgcaaatataccacacgaacttgaagaggcagccagaatcgatggatgcggttatgccatgacctggtggaaggtgatttttccgattgcaagacccggaatcatgactgcgggaattctggcatttctgaataactggaatgagtattactgggcttcactggtgatcgttgacagagaaaagctgacggttccggcgcttttgtccacgtttaccacatccttccgtaccaattacaatggtctgttttcggcaatggtgattattatcctgccgcctgtgattctgtactgtgtgttcagtaaattctttgtggaagctctttccggcggtgcggtaaaaggttaaaaaggaggaaaaaacatgaaagtaataacggcagttttgatcggagcaggtctgcggggcggctgggtgtatgccgcctatgctcagagtcatccggaagatctgaagattgttgcagtagcagaaccggatgaggaaagaagaaatctgattgcagaggttcacgggataccggaggaacgctgctatcaggattatagggaactgttggaagaggaaaaaatggcagactgtgcccttgtctgtacacaggataccatgcattttgaaccggtaacaaaggctctggaaaaaggatatcatgtactctgtgaaaaacctatgtctccggatgcttcggaaattgtcacgatgggaaatatggcagaaaaatatggaaggatcctgatgatctgtcatgttctgcggtattcttcctttttctccaggattaaaaatcttattgaggaagatcgccttggaagactgatcagtattcagcatattgaagaggttggctactggcatcatgcccacagctttgtgcggggaaactggagacgcagtgatgaaacaagtcctatgatcctgcagaaatgctgccatgatatggatattcttctgtggctggcaggaagctcctgtacgaaggtcagctcttttggagatctgacatatttcaaagaagaaaatgcaccggagggtgctcctgcttattgtctggatggatgtcctcacagggatcagtgtgctttttatgcaccgaagttttactttgagcatccaaaagcagaagcggacggattcatccatgcggtatctgcggataccgacagaaaagcagttcttgaagcgttaaagacaggtccttatggacgctgtgtgttccattgtgacaataatgtggtggatcatcaggttgtgaatctggaatttgaaaaccatgtaaccgtcaatatgactatgagcgccttcacggaaaactgtgccagaaggatccatattatgggaaccaaaggagaactcaggggaaatatggagcttggagagatagagctttctgacttttccacaggggaaaaggaaatcatccggctttatacaccacctacagggcacagcggaagcgatacaaatatgatgaaggattttgtaaggtatctgagagaggacagcgtccaggtacgctccggagcttccgtgtctgtggaaagccatctgatcgctcttgcggcagaaagatccagagtgacaggagagaccgtggatctcagggaattccgaaaagaagcagaggagcggtaatatggatctgagaaggttttgcacagagatcggtctgccttccggcgcagtgtgtattgtggaaaaaatgaatgaggagatctctgaagtccgatatcagtatgtccgtgaactgttttttacagacagagaggaaattttccgggagatcgcatctcttgccggatacagacaaaggtttctttattattactgcagacttgcatgtgaaacatatgagaaatatcagagagaaggaatcggagacagggtgttttttgacaccttttccgatattgccgtctggtgtcaggtatgtttccgaagatacggggaatacgggattcaggaatatgaatggctgtggcgtcatgtggaaatgacgctttttcgtctgggcagactgcagtttgaaaaaacagaatctttgtgggaatttgaatataaaggcaggaagacagcagtgggcgatccggtaatcagtatacatatccctgaggggcagccgctggatccggaagcctgcagagaatctctggatatgggacggaaattctggggtggagagcttccgtatgtatgccattcctggctgctttttcccggattaaaggagcttttggatgaaaaatccaatattctccgctttcagcagatgtttgagatccagtcggtggattttcagttccgggaaggggaagaaaggatttttgactgcctgatggaggatccggaaaaatatccggaaaataccagccttcagagaaatgcacggaaatatctgaagcagggcggcaggcttggcagcggcctgggtgtgatagctgcagattagggaaaatttcatgttttatcataaccctctgattgatttttgttataagaaataatataatagcagacgaaactctgtaaaaacagagaaagatgctgatacagtacaggacagggatcctgtatagaacataacagaaatcatcagggggtattttatgagtattttgaacgtagaacatctgtcacatggatttggagaccgtgctatttttaccgacgtgtccttccgtcttctgaaaggagaacacattggtctgatcggagccaacggggaaggaaaatccacttttatgaatattgtgacagggaagctgatgccggatgagggaaaggtggaatgggcaaaaaatgtccgggcaggctatctggatcagcatgcggtcctggaaaaaggcatgaccatccgtgacgtgctgaaatctgcttttgatccccttcttcagaaggagcagcgcatgaacgaaatctgcgacatgctgggaagtgcggatccggaggaaatggatgcactgatggaggaactgggaaatattcaggatgagctgacacttcatgacttttatgtgatcgacgccagggtggaagaggttgcaagggcgttgggacttctggatctggggctggaacgcgatgtaacagacctgagcggcggacagagaacgaagattcttctggcaaaactccttctggaaaaaccggatattcttcttctggacgagcctaccaactatctggacgaggaacatattgcatggctgaagcggtatcttctggagtatgagaatgcgtttatcctgatctctcatgatattccgtttctgaatgaagtagtgaatcttatttatcatatggaaaatcaggagctgaaccgttatgtgggcgactacgatcattttcaggaggtctatgcggtgaaaaaagcccagctggaggcagcttatcgccgccagcagcaggaaatcagtgaactgaaggattttgttgcaaggaacaaggcccgtgtatccaccagaaacatggctatgtcccgtcagaaaaagctggacaaaatggatgtgatcgagctggcagcggaaaaaccgaagccggaatttaacttccgttatggacggactcccggaaaaatgctttttgagacacatgatctggtgattggctatggggagcctctgtcaaagcctttgaatttctatatggagagaggtcagaagatcgctctggtgggaaccaacggaattggaaagacaacgcttctgaaaaatatgctgggactgattccgtctctttccggtacctgcgaccagggagaaaaccttcagatcgggtatttcgagcaggaggtaaagggagacaataaaaatacctgtatcgaagagctgtggcaggaatttccttcctatagccagtatgagatccgttctgctcttgcaaaatgtggtctgacaaccaagcacattgaaagccaggtgcgtgttttaagcggcggtgagcaggcaaaggtgcgcctgtgcaagctggtgaaccgggataccaatattctggtgctggacgagcctaccaaccatctggatgtggacgccaaggatgagctgaaaaaagccctgaaggagtaccggggaagtctgctgctgatctgccatgagccggaattttatcaggatgtggtaaatgaagtgtgggatatgagtaagtggaccaccaaggtgctgtaaaagcgtataaagattatataaagattttctttattacagaatatccaatgacttttccggaaaaaggtgatacaatatcctgaaaatcggagtgatacctggcagatttacagaaaaatcagaacaggttccgatgagataaggaggaaatatatgtacaggaaaagaagagcaggttccggtaaaaaaggaaagcttctggcagtgcttgcggtaattgtaatagctgctgtgtactactatgtggcaattcctgcggtgaacattcattccagtggattctggatgtttctgatcgcgttggtagtgctgggactgctgttttatggaggcagaaagggcatccattcaaaagaagaggtcaaaagttcaaaaatcctgaagctggggatagggctggtcgtggttctggtgcttgtttattttgcaggcagcattctgtcctcaccgatcgtcaatgcaaaaaaataccggaacctgatggttccggaaaccggaaattttgcagaggatattgaacagatcagctacgatcagatcccgcttctggacaaggaatctgcagcgcttctgggaaaccgtaaaatgggaagtatggtggatatggtttctcagtttgaagtcagtgatctttattctcagattaattatcagggacgtccggttcgtgtgactcctctggtatacgcaagtcccattaaatggctgactaatatgagtgatggaattccggcttatattactattgatatggcaactcagaatacagagcttgtgaagctggatcaggggattaaatactcagaggcagagtattttaaccggaatatttacagacatctgagatttaagtatcctacttacatttttgaccagctcagctttgagattgacgaagagggaactccctactgggtatgccctgtgaaaaaattcaatatcggactttttggcggacagaccattggaagagtggttctttgtaatgcagtaacaggagaatgtaaagattataagatcaaagactgtcctacatgggtagaccgtgcctatccggcggatcttctgatcgagctttataactaccatggtacgctgatcaacggatttatcaacagtgttctgggacagaagggctgtcttaaaacaacagaaggctataattatcttgctattgatgacgacgtatgggtatatactggcgtaacctctgtaagcggagaccgttctaatgtaggctttgttctgatgaatcagaggacaaaggaaacgaagtattatgagataccgggagcagaagagtattccgcaatggaatctgcagaaggtcaggtccagaaccttggttataaggcaaccttcccgctgcttctgaacattgcagatgagccaacatattttattgctctgaaggacaatgcaggtctggtgaaaaaatatgccatgctcaacattcagaaatatcagaatgttgccattggagatacggttcaggagtgtgaaaagaagtatctgaaaatgatcaaaggcagcagtgcggctgtggcaggagaagatacgaaaaagatcaccggagagatcagaagaatggctcagggcgtcatagatggaaacactcattattatattgtacttgaggaccatgaggatctgatctttgatgtgcctattacagacttccttggaatcgtgaagtatgatgttggagacaggatcaccatttcctataatgaagcacagcctgcaaacagtgtggtttctgtggaaggagatgcgggaagcgctgagggaagtgtggaaactgacggaggcggctccggggatgataccgcagctccgggagaagaggaatcctgagcaaaattactttgcccatgatatactttacagtagcaggtatttcaggaaaataaaataacagaacagaaagctgccggacagctttcagcaggaagtgataacctgctggaggcttgtctggcagcttttactttgcaggcaggaaaaagctaaagccgtcacatttttatgttctgtggggaacagctttttgtttggattgggaagtttagcagtattgttattccgcaatataatacattgcggaaaatgcaggaagctctgcctgatatctgccgtctgtgatctttctggcagggcggcggcgcttcaggctgcctccgtatgcctccagatcactgttaagaagctctttgatcttctgacagccgggaagtttcagttcataggtctgagaccggtcagaaaagttaaagactgcagtaaggtgttcttttttgctgctccgttccaatacatagacgcaggtctgttcctggtggcagtcaatccaccggaaaccgtctgcctggtaatctttttcccagagggcagaatgggtcaggtagatttcattgagatctttcataaaacgggcgaatccactgtgaatgggataatccagaagcatccagtcctgttcccgtttttcgtcccattctctcagctgtccaaattcatttcccataaagttgagctttttgcccgggtgggcatacatgtacatataaagcgctcttgcctgagggaatttgttgtcgtaatctccattcattttctggaggatcgtagcttttccatgcactacctcatcatgggaaagagggagaaggaatcttgcatcatagtaatacatcatggaaaacgtcagtttatggtaattactgcttcgatattccggtccggtacgaaaatagtcaagggtgtcgttcatccatcccatatcccatttatagtcaaagcccagaccgccctgggaaaccgggtctgtaaccttcggaaaggctgtggaatcttcggcagccagaatcacagaggggtgcatttctttcagtcctctgttcatgtactggagaaattccactgcgttgaggtttacgccccgcgcaggatccccctgccagtaaatagccctgctgatggcatccatacgaagcccgtctatatgaaattcttttatccagtagtttgcagaagactgcaggaagctccgtacttctccacgggaatgcataaagttgcagcttccccattcgctgacacctacggcagaatgaggatactcgtacagagctgtcccgtcatactgagccagaccatagctgtccagtgcaaaatgtaccggtacaaagtccatgatcacgccaatgccattctgatgacagcagtcaacaaaatatttcagctgatccgcagtgccgtatctggaagtggggctgaaaaagcctgtggcctgataaccccaggattcatcgcagggatattcgttcagaggcatgatctccagataattgtagccgttgttttttacatagggaatcaggatttttgccatttcttcataggtataccaggaatctgctttgtctgatggctttttaaaggaaccgaaatgcagttcataaatattcagcggcttctgacggcagtccgtgcgggctgccatccattcttcatcgtggaaagaatagccctgctggttccttataacagaggctgagcctggacgcagctccattccaaagccatagggatcgcagtgctccacccggtttccggatctgtcataaatacagtatttatacatcattccttcctttgttcccggaacagaaagctcccagaaattgccgtcagaaaccttgtgcatgtcccattcctgccagtggttaaaatctccgaatacagtgattcgggaagcggcaggcgcaaaggtgcggaatatggtcgttccgttgtttatatgagcgcccagatagtcataggcatcaaaaatttttcctgtatagaatccataaaaatccatgatcttctccttatagataatagacatcagttgtgcttttgactataatataaaaaacagtacagagaatgtccaccaacaaaacattctgtaagacggataagcaaccttttgataaaaatgtcgcgtaatatacgaaaggcagctatgaaaagaggacaggctgggacattcggaaaaaacggaaaacgagggagagtatggatatcagaatagaaaaaacagaaaaagccattaaaaatgcatttctggagctgagggcaaaaaagcctctggaaaagatcacagttaaggaactgtgcgctcttgcatgtatcaataaatctacattttacagccattacgaggatatttttgccctgtcagagctgatggaggcagaaaccattaccgctgtagtaaaaaatatttccgcgcagcagcaggatcctttccgggagcctgagatttttaccagaaatctttacatggctcttttgtccagtaattctctgatcggtattctgttttccgggaaagaaaaagcgcggctgggcgactgtctggaaatggagctgaaaaagctgatctggcagagatatccggaatatcagcatgatacagagcggaatattcttctgtctttttgtatacagggatgctttcacgcatatctgaaccacagggatgaggatctggatgcagtggtccgagtcagcgaaaatgtggtgagaaacctcagaccgctgtatttccgggagtaaacatggaagaaatttcagtggaaatatttcgcagttccgggaaaagcgatcagtttcagaaaaacggaacagatgaaacaggaaaaggggaaaaacatgagcagaatattgcttttagaagatgatctgagcctgattaacgggctttcttttgcattcaggaaacagggctttgaactggccgtagccagaacgctcaaagaagcagacagtttgtgggcggatggaaaatatgatcttctggtactggacgtatcgctgccggacggcacgggatttgaattttgcaaaaaagtgcggcaggtttccaaagtgcctattatttttttgacagcggctgatgaggaaatggacattatcatgggattggatattggcggagacgattatattacaaaaccgtttaagctgggagtattagtttccagagtaaatgcgctgctccgccgggcaaaagatttcagctcatcagatacgcagctggaatcaaatggaataaaagtacttttactgcaggggcaggtctttaaaaacggggaactgctggaactgactgctgcggaatacaagcttctgtgcctgtttatgagaaatcccaatatggtacttaccaaggaaaaaattttgggccagctgtgggactgcgatggaaattacattgacagcagtacccttactgtatatatgagacggcttcgtatgaagattgaggataatcccggcgatcctcagatgcttctgacagtccggggaatggggtacaaatggaatgtgacagggtgaggagctttatgaaaatatttgtaaataaagagatcagaaaattgtttcttgcattatcagttatctggatggcagcccttctgctgacccagggattcttatatcggtacttccagaggatttctttgttcctgttacttgtttttgcattggcaggaggattgatactgtcagcgtgttattcctgtttccggaaacaggatcagcttatggaacaggcagtgtcacagatcaacgggtatcttgacggcaatcgcaatgcgcgtattgagtgtgatgacgagggggaactgtaccggctgtttcacgcggtcaattctctggcagcggtcttaaatgcacatgcagataaccggcttcgggaaaaggaatttctgaaaaatacaatttcggatatttctcatcagctgaaaacaccgctggcagcactgaatatctataacgggctgcttcaggatgaggatgtggatccgtctctggtaaaagagtttgcagatttatcagaacaggagcttgaccgcatcgaaacgctggtgcagaatctgcttaaaatcacaaaactggatgccggttccattatgattgaaaaggaaacggaaaatgtggcggatatgatgggggacattgagctgcattttgcatacagggccagacaggagcagaaagaaatccttctgtccggctcagataaggtgattcttttctgcgatcgtgactggctgtccgaagcaatcggcaacattgtaaaaaatgctctggatcatacagaaaaaggagataagattcatatcgaatggagagccttgccttctgtcgttcaaatcgtggtaaaagacaatggatgcggcattcatccggaggatctgcaccatattttcaagcggttttatcgcagccgtttttccagggacagacaggggatcggtcttggacttccccttgcaaaagcgatcattgaggcacatgacggcagcattgaggtggacagtgagccgggaagaggcacggtttttacaatgaattttttaattcctacaaaattgtaggctggctgtaggctgactgtaatgtttcagtgctatcctttgtattgtagacaaaaaagaacattatctgtctgcagagcaaagttattgagaaagaggtgttgcataatgaatttattagaggtcagaaatatctgtaagatttatggcagcggagaaacttctgtaaaggcactgaaagacgtcagcttttctgttccaaggggtgaatatgtggcggttgtgggagaatccggttccggaaaaagtacccttttgaatatgatcggtgctttggacattcctacttcgggaaaggtgctgatcgacggcaaggatattttttccatgaataaccggaagctgaccgtattccggcgcaggaatatcggctttatctttcaggcgtttaacctgatcccggagctgacagtggaacagaacatgattttcccaatgctgttggattatcagaagccggacagaaaatatctggaagagcttctgactgtactgaatttaaaagatcgccggaattacctgccaagccagctttccggcggccagcagcagagagtggccattggacgcgcgctgattacccgtccggctttgatccttgcagacgagccaacaggaaatctggatactcagaacagcagcgaggtgatcgcgctgttaaaagaggcgtcaaaaaaatatgagcagactattattatgatcacccacaatcgcagcatcgcccagaccgcagaccgggtgcttcaggtgtcggacggagtgctgactgatttcgggaggtgctgtcaatgaaaagctatttaagccttattccgatttctgcaaaggtgcgaaagagacagaaccgcatgacgatgctgtgtattattatttcggtactgctggttaccgcgattttcagtatggcagatatgggaatccgtatggaaaaaaagcgcgtgacagaagagcatggcagctggcatattatgctgaaggagccgactgagaagcagattgatcagattgcacagaggacagatgttgcagctgtctctcattatgacgcactgaatgttgatctgtctgatgactatacgattcagggaaaaacatgcgttattgcaggcggcgatcattcgattctcacggaaatctatgaggatctgacagaggggcagtatcctgtaaaagagaatgaaatcttactttccaatggagcgaaagagttactttctgtaaatatcggagatgtgattaccatgcatacaccggccggggattttgactataggatttccggttttggaggagatgttaccattactacagatgccgatgtggtggggacttttctgagctgggattcctttcagagtctggcaaaagcagaagaaagcaggcttgagccggtatgttttgtacgctttaatgaaaatattaatattcgcagggcgatttcagagctgcggcagacctatggatttactgatgaaatattatcggaaaatacggctttgctgggaataacaggatccagcagcgattcttatattatgggaaattatcttatagctgtcatcctgtttgttctggttctggcagcaggagtctttatgatcgcgggaagtctgaacagcagaaccgcagagagaacacagttttttggaatgctccgatgtattggggcgagcaggacccaggttatgcacatagtcagactggaagctctttactggtgtaaaacagctgttctggttggtgtggctgcaggtattgcaggtacatggatactctgtgcgctgcttcggtttggggcaggagccgagtttgtacagattcctctgtttgaaatcagtggtgtggggatcatcagtggaattattgttggagttttgacagtgctgttatcttccatttctccggcaagacgggcggcggctgtttctccggttgcggctgttaccgggaatttttatgaaaacggaaacgcatcccggccggttaggaaaaactttctgaaaattgagacagccctggggattcatcatgcagtatcctcccgtaaaaacctgcttcttatgacgggttcctttgcacttagtattattatgattttaagcttttctgttcttgtgcaatgggtgaatatggcgcttacccccttaagaccctgggcgccagacgttttttacagcagtccggataatctgtgtgaaattgaaaaaagctttgtaaatcaggtggaaaaccagccctatgtaaaacgcgcgtttggcaggatgtatcaaagccttccggcagaatatgaagggaaatcaggacagattgatttgatctcatatgaagaagatcagttccgatgggcggcagaagacctgatcgcaggtgatatatcggatgttgctgagggaaacggcgtactgacagtctatgataaaagcaactctctgaaggttggagacaccatccggctggagcagacagagcttacagtagccggagttctggaagacagtccctttgatacaacggatcagccaattgttatctgttcggagagaatgtttacggatattacaggtgaagatgcctatgctgttcttgatgtgcagctttcctcaaaagcctcagaacagaatgtgaatgagcttcacgcactgtcagacggacattatgatttttatgacaggatggcgcagaataaagacacgcaaaatacgtattttatgttctgtttatttgtttatggattcctggcagtgatcacactgattactgttcttcacactgtaaacagtatttccatgagtgtatctgcaagaaccaaacaatacggagccatgcgcgcggtgggaatggatgatttacagataaagaagatgatcagtatggaaacagctacatatacgatattcggactttttgcaggctgcggtctgggtctgcccctgcattattttttttatactcagatgattacagattattggggaacccaatggcagcttccttcagcatccgttgcaggaatactggcgctgcttgtgatcgtttcacttcttgcaccgtttcttccggcaaagcgcatctgtaatatgcccattacagcaacgatcaatgaattgtgattgcttgttggcatctcgactatcgcctccttttgtgctataattcactattatgtgaccacagaaggaggcattttttatgggcggacaaaagcctgaaaaaacaaaaaaacgtatatgcatcggtattcttgcccatgtagatgccggaaaaacgaccttatccgaagggcttctttatctttgcggagaaatacgaaagctgggaagagtggatcatggagatgcctttctggatacttatgagctggagagggaacggggaattactatattttccaagcaggcgcggctgaaaacagaagagatggagatcacgcttctggatactccgggccatgtggatttttctgcggaaatggagcgtacccttcaggtgcttgactatgcgatactggtaataaacggcatggacggcgtacagagccataccatgactttgtggcggcttctggaaagatatgagattccggtgtttctttttgtaaataaaatggatcagcagggaacagatcatgatgctcttctcagggacctcagaaaacgtctcaacgaaaactgcatggattttgcctgtctgacagaggataacagtgaaagagctgtcggtgacgataaaacagagagtatgaaatccggaacaggcacatcagaagacctggatgaccttatggaaaatcttgccatgtgtgaggaagagcttctggaaacctatctggaaacaggagaggttgctcacagagaaatctgccgtctgatcgtgcagcggaaggtattcccctgctggtttggttctgctcttaaaatgcagggagttcaggaatttcttcagggactggaaagctatactatggagcgggcttatccccgggaatttggggcaagagtatttaagatcgccagagatcctcagggagtgcggcttacctatctgaagatcacaggaggagatctgaaggtcaaaacgattttggatggggaaaagatcgatcagatccgtatttattccggttctaaatatgaactggtccaggaggtttcggcaggagatatctgtacagtgaccggacttacaaaaactcatccgggtcaggggcttggcacagagcaggagtcggttcttcctgttctggagcctgttctcaattatcagatcatacttcctgagggatgtgatgttcatgagatgctgaaaaaactgaaacagctggaggaggaagagccgcagcttcatatagtgtgggacagtgttctgggagaaatccatgcccagttaatgggagaggttcagatcgaaatcctgaaaagtatgatctgggaacgctttcatgtggcagtggaatttggcgcaggaagtattgtatacaaagagaccattgcagagcctgtgatcggtgtgggacattttgagcctctgcgccattatgcggaagtacagctgcttattgaaccgggagagccgggaagcggctgtcagttttttactgcctgcagtgaggatgttcttgcccgtaactggcagagactgatccttacccatctggaggaaaaggagcatctgggagttctgacaggctctgccctgacagatgtgcagatcactcttctgaccggacgggctcatgcgaagcatacagaaggcggagatttccgtcaggcaacctaccgggcagtgcgtcagggactgaaaaaggccaaaagtattcttctggagccttactatgaatttcggctggaggttcccgcagagatgatcggcagggcaatgtccgatgttcagaaaatgcaggggaaattcaatccgccggaaacagacggtgatatggctgttcttacaggtatggcagcagtttcatccatgagggattatcaggaagaggtcatttcctacacaggaggaagaggaaggcttttctgtaatctgaagggatatgcgccctgcagaaatcaggaggagctggtaatggcttccggctatgattccgagcgtgatctggaaaatcctaccggttcggtgttctgcgcccacggggcaggttttgtggttccctgggatcaggtggagaattataagcatctggactgcggcgcggatgcagaggagctggcacaggatacagaaaactggtatgagattccggaacaggagacatcaacggagagttttaccgggatgcccgcaggcggtcagaacaggacaggcagcggaaaagggcgaaaaggccagaagggcttttcctacagcggaagctatgaggaggagcaggagcttcaggcgatttttgagagaaccttcggggccgtaaaaaaggaacggtttactccatccagaacagtgggaagaacttctgagagtacggtccgctatcgggcaggaaagccccgcagggaagaatatcttcttgtggacggatacaatattatttttgcctgggaggaacttcgggagcttgcaaaggaaaatattcatgctgcctgcgataagctgatggatattctcagcaattatcagggctaccggaaatgtactctgatccttgtgtttgacgcctataaggtggagggccatgcagaggaagtgattccctatcacaatatttttgtggtatatacaaaagaggcggaaactgcggatcagtatattgaaaaaacagttcacagaatcggccgtcagtatcaggtgacagtggcaacctctgacgggctggagcaggtgatcattatgggacagggcgctcaccggatttctgccatgggattaaaaaaagagatcgaggatgcggaaaaggctggaaaacaggaatggaaagcccgacgccagagcagcaaaacttatctgtttgatcaggtatccgaggagctttccgctcgtctggaaaaggtacggatgggacaggaagagctgtaaaataagacagatgaaggttgggaaacaggcatatggaaaagaacagtatggaacagacaaacacggaaaaccgcctgcttcagcttcttctggaaacaggagagcggcttatggcctccggagcggaggtaaaaagagtagaagatacgctggaacgtattggagtggcatacggagccgagaggatgaacgtatttgtgattacatccagtattgtaatcactctggaaagaagcgacggaactcttttgactcacacaagacggatcacaaaatcaggcacagacttcctggcactggaacgtattaatgcactgagcagagaatgctgcagggagccgctgcctctggatttgtttgaacagcgtttacgggagtgtgttccgcctgaaaaacagtggcagatgtatctgggaagtgttcttgctgcgggaagctttgctgtgttttttggaggcagccttgcagacgggctggcagcagccgtttttgcagtgatcatctgtctttttcaggaaaaaggcggacagcttctggcgaatcatgtaatgtttaacttggtgtgttccttttttacaggtacattgatctgcctgacggcaaaatttctgccgttttttcatgcagataagattatgatcggggatattatgctgctgatacccggaattgctattacaaattcaatccgcgatatgctgatgggagatacaattgcaggaattatgcggctgattgaaagtattctgtgggccggagcccttgccagcggctttatggcttctatatggatggtgggaatatgaaagacgtgattttgcagcttgctatggcgtttatgggatctctgggattttccatgatcttccggcttcgaagaagcctctggatggccggttctcttggtggagccctgtgctggggatgttatcttctgatgtttgatgtgacacagcatatttttgcttcaggccttgtggcatctgcttttgcggcagtttacgcagagatatttgcgcggaaaaaaatggcgccgacgcttttgtttgtaataccttcagtggtgcctctgattccgggaagctctctgtattatacaatgagcgctgctgtcagcggaaataccagagagatttctgaatacggaagtctgacgcttcagtacgctctttccattgcggcgggaatcagcattgtctggacgttctgttctatctggagacggtaccagacaatgaactatataaaaaaacattctgattaggagcttcggctccttttttttatttattaggaaattagtacattttgtactagtttctgaataaacaaaaaacgctccacgaggatgcgaccagatgcatgcggaatatgactgcccatggcagtctgcatctggcgcgcaaagcggaacaagtccctcaaggattgagggatttaggaagttcgaagcggatcttttctcttttgttctttgaaaattatcagaaaaatattgactttttacaggaaaagatatattatgatgatatcgaaaagatatcaaattaattctgtttccgaaaagagggaacggagaggaaacgtaaatacaggagggcctgtatttgcgaaaagcagggaggaaagagattatggcagaagtaaaatttacggaagaaaagaagcttaaggctgcgccgggatttcccatggcagttgtgtcactgctggtgaccctggcgggaattcccatgtatgttctgggagctacctggtttggggcagataagccggctggcggagtggttcttgcaatttgtattgtgctgggcgtacttttgaatgttggcggaattattatgttctgtggactgaaggtaatccatccaaatgaggctcttgtgctgactttgttcggaagctactatggaacactttataacgagggattttactggatcaatcctttctgtgaaacagtaggcccggcagcgcagactattgataatgaggaaaagcagagtaatgcaaaatccggttccattaacattaatttaagcggcggaggcgggaaggcagccactaaggcagtttctcttaaaaccatgactctggacaataaacgccagaaggtcaatgatgagctgggcaatccggtagagatcgggaccattgtgatctggaaggttgcaaatgcaaccaaggcagttctgaatgtagagcagtatgcagaatttctttctatccagtgtgatgcagttaccagaaatgctgcaagaaattatccttatgacaatggcgactgcggcgaaaagactcttcggggaagctgtcaggaaattgcggatatcatgcaggcagagcttcagtccaaggttgaggaagccggacttgagattctggacgtaaggatcacccatctggcatatgctccggaaatcgctgctgcaatgcttcagagacagcaggctgctgcaatcatagatgcccgtcagaaaatcgtggaaggagccgtgggtatggtggagatggctttgaatcagctcagtgaaaacaatgtggtggagcttgatgaagaacgcaaggcagctatggtgagcaatcttcttgtagtactttgcggaaataaagatgcgcagcctattgtcaacagcggctcaatctattaatatagaaagcaaataagtaaaggaggcggaagccatgccggctgcatcaaaagaaaaaacaaaaaagcagataccactgagggtttccgcctcgctttataatgaactggctcagtgggcggaggacgacttccgttccattaacggtcagattgaatttctgctgacagagtgcgtaaagcaccgtaagaaaaaaaacagagacattccggagaaatgaaataccggacaaaataacaggataccttctggcagacagggaaaaccccggaaactgtcagagggtatttttttgtgcaaattcaaccaaaaataatcctgaattttgtgaattagtttgattgactttgaatgattataactgtatactatgaaatataaagagaaataactgaaataacttcaaactcggtcatgcattaaatgaaaattattgtaaggagaggtgaaaaaatgatctgtacagttacttttaatccgtctctggattacattgtagatgtggaagattttaagctggggcttaccaacaggacaagctcagagttgattcttcccgggggaaagggaatcaatgtgtccatagttctcaggaatcttggaatctgcaacagagctttgggatttaccgcaggctttaccggagatgagattatccgcagacttcaggaaatgggagtggaatcggattttatcaggattgaaaggggaatttcccgaattaacctgaagctgaaatccatagacggaacagagatcaacggagcaggaccggatatcagcccggagagagtggaggagctgatggaaaaacttgacagcctgaaggaaggagatgttctgtttctcgcaggaagtatcccggcttccatgcctgatgacatgtatgagcggattatgaaaaggctggagggaagaggcgtgatgactgtggtggatgccacaaaagatcttctggtaaaggttctgaaatatcatccttttcttgtaaagcccaataaccatgagcttggtgagatctttggcgtggagttaaagacgagagaggacgttgttccatatggaaagaaactgcaggagatgggagcggaaaatgttctgatctccatggcaggggagggagcagttctcatcgctgcaaacggacaggtttataagaaaccggttcccacaggtacgcttgtaaacggcgttggcgcaggagattccatggtggcaggctttatggcaggctggatggaaaaaagagattaccgccatgctttttacatgggaatcgcagcaggcagcgccagtgccttttcagaaaatctggccacaggcaaagaggtagaagcggtttaccgtcaggtagccggacaaaaacaggagggggaaaacatatgaggatcacagatctgcttgacagaagaagcgtatcgctgagtgcagcaccaaagagtaaatcagaggctcttgatatggctgtagaccttatggtaaagagtgaaaaaatcagcgacagggaagcctaccggaaacaggtatatgcaagagaacaggaaagtacaacaggaatcggagaaggaattgccattccacatggtaaatgtgacgcagtacagaagcccggtcttgctgcaatggtagtaaagaacggagtggagtttgaagcccttgatgacgagcctgtgactcttctgttcctgatcgcagctccaaacacagaagataatatccatctggatgtgctcagtaaactttctgttatgctgatggatgaggaatttaccgcctctctgagaaacgcacagtctgtagatgagtttatggaaattattgacaaagctgacgatgagaaaaaagatattgatgagagactggctgatacgggaagcgcagatgagggacaggtaaaaatcctggcagttacctcctgtcctaccggaattgcccacacctatatggcggcagaaggaattgaaaaagcggcaaaggccagaaactgttttatcaaggtggagacaagaggctccggcggagccaaaaacgttcttacagatcaggagatccaggaggctgactgcattatcgtggcggcggatgcacaggttcccatggaacgttttgatggaaagaagctgatcgaatgtcaggtttctgacggaatcagcaaggcggatgccctggtggaaagagccattgcaggggatgctcctgtatatcacgcagcagcgggagcatcgaattcttcggcggcagcaaaggcaggcggaggcgccggccacaaaatatatacgcagctcatgaacggcgtttcccatatgcttcctttagtagtgggcggcggcattctgattgcccttgcttttttgattgacggtctcagtgtggatctgaattctctccctgcggaccagagagcaaacttcggtaccattactccggtggccgctgttctcaagaacatcggcggaacagcgtttggctttatgcttccgatactggcaggctttattgccatggccatcggcgacagaccggctcttgcagtaggtcttgtaggcggaatgatcgcagcaaacggaaaatccggttttctgggagctctttttgcaggctttcttgcaggctatctgatcctcgggcttcgcaaaatctgcgataagctaccggaagccctggaaaagatcgcccctgttctaatctatccggttgtgggaattctcgtaatgggactttgtatgacttttgttgtggaacccttaatgggcggattgaacaccggattaaataatgccttgacaggcatgggaaatacaagtaaagtaattttaggacttattcttggcggtatgatggctattgatatgggcggtccttttaacaaggcagcttatgtgtttggcacagcgtccattgcagcaggcaattatgatattatggcagctgttatgatcggaggaatgacacctccatgtgccattgccctggcaagcctgcttttcaaaaacaaatttactaaagaagagagagaggcggcgcctactaactttattatgggtctggcatttatcacagagggagcgattccttttgcggcatctgatcctctccatgtacttccgtcctgtatcatcggttcagcagtggcaggcgctgtttccatgatgtttgactgtacactgatggctcctcacggaggaattttcgtattcccggttgtgggaaacacaatggcatatgtggctgctcttgtggcaggtacgttgatctcagccgtccttctgggagtgttaaaaaagaaaacagcataaaaaataaataaactggaggataaaaccatgaaagaattcaagtatgtagtaactgacaatgagggaatccacgcacgtccggcaggcgagcttgtaaagcttgtgaagcagtttgagtctgtggtcaccattgaaaaagaaggcaagaaagcagactgcagaaaacttctggctctgatgggacttggcgtaaaaaaaggtcatgaagtaacctttactttcgagggtgcggatgaggatgctgcctgcgaggcagtaagcaaattcatgcaggagaagctgtaatcaggagagaaaccatgctgacagagcaaagatatgagatcatcctggaacttctggaaacaaggaaaagtgtcacagtcacggagctgaaggagattctggacacatcggagtccactgtcagaagagatattacggctcttgacaaaatgggacgtctgacaaaggtttttggcggagcagtttctctggaaaatgcagtatctgcctatgagcctactgttgctcagaaatcagatcttaatatcgaagaaaaaaagaaaattgccagatacgccgcaggcctgatcgaacccacggattttgtatttctggatgcgggaaccaccacaggttatatgctggattatctggagaatacccgggctgcctttgtgacaaatggtgtatcacatgcaagaatgctggctcagagaggcattcatgttacgcttataggcggtgaactgaaaggctccacagaggcagtgatcggaagctttgctttacagatgcttcagatgtatcattttacaagaggatttttcgggacaaacggagtgacgaagcatgagggctttacaacaccggatgccagcgaggctctggtaaaaaggaaagccatggagcagtgcagaaaagcctatgtactcagtgatgcttcaaaattcggtcagatcagttctgtgacctttcgggattttaaggaagcggaagtgattacggatcgttgtccgaaggagtttgaaggaaataaaaatattgtggttgtgcggtgacaggcacagatggccggagcggttcattcattgtggatgaatccgctccggctttttggtactgtttatgaacttcccgggaactgtgatggaagacagggcagattagtctgcaatcaggtattaattatgaataaaactgtaggtggggctgctgtggacggagcgtatcggatcatttactgttctgaggagcagatacccagctgttttctcagactgcgcagcgtgcggcggaaaacggcgtaaatgataagggcgatcacggcagctacttccaggcacatggcaaaaccgagaatttcggattttgtcagaagtccgtcattggcaagcaaaatcataaaataaagcaggatcatcagcgacattccgctgatggcaggaattttgaataccggaccagcctgtctctgaagctctctgccaagaaaggcgggagaagcgccaagacgcatcagatctgaaaacacataggcattgttcagggcaatggtctgacagcgggtataggcaatgaccagggctgcggtaatgcagataatggcaatgaacaaaaaggtcatcataaatactccaaaggttttcagctgatcctgagcatccataatacggaactgaggaatataattccagtacatccggaagtcagaactgttgatgttggtacggtccacctgccgttcctccggactgacagtataggtggaaccatagtaattatttgtatagccctctgtcataacatactgaaccggatcataatagctgttgctgaagtgctggtcatcataggaatttacaattttcacaaagagctcctgtgcaaaggcgtaactgtcttttccttctgaattaaaccagatcatggaaccggtccattcaggagcaagtccctgagagattttttcgtagtcgttgtcatccagaacagcagtgccgtgagatgccatatcttcaaaatgtacaaagcctttacaggtaaccggaagctctttcctggtagtcatgtttgtaaaaagtgttgcattttccactgtatcgtaagcggtttcttcttcatttgtaactgcgtagaagaagccgggatccagtgaaatgttctgtccggtgatctgattataggtggactctgacagggcatgacattcatcggcaatgtcaaaatgctgataggaaagagtgttgtccgggttcagaatctccatgttattatcacaggcaagggaaagataggaacactgtagccagtctttaatctgaaaatcatgtttttctgccagagaataaatctcttcttcagaagggagagactggtcggagggccagaaccaggaatagtcataggcgcggctttcggagcccatggaaagtccggtatgaagcatcggcagataaaaaatcccgaagcagccgcctgcaaccagcacagtagtaaccaggagactgtttaccgtctgttttccctgaaatttcatcatacttctggcaatgatgtttttccagggatttttgcgtctggaggtccagccgttgacaaccgtgtgaagcatgaccatgtaaagacctgcaaaagcaggagcgtacaaaaggttgagaaaaggggatggatatctgtgaaacacattcatgtatacagttggaccttcgtatcctgcaactgcgcctgccagaatcaggacaatacccacagggccgcaccagcgtccaagctcttttacaggctcgttctgatgctcttcctggatcacgtccagaatattggtgcgtttcatataaagaaaagcaagaacgcatgcgcagatcacaaccagggctgtgaagcctgcagatacccagagacaccggaaatctacgttcagaaccatttcttctgaatttacaataaaaatccggaaggcagtccacagaagaaacaggaagggaaaacctgccagagttcccagaacagcagagctgccgcttaaaagcagcacctcacggaaaagaccgggcgccagtgtttttctggaagctccgagagccataaggatgccaagctgccgtgattttttgcggaaaaaaaggctggcagcataaatcgtaaatataacgcagccgaacagggccagaacgaagatggcgtataactgtttccggctgtcgcctcccggaggaaaaatatcctgtacagtgggagaaaacatcagtcccgaataagctgtcatcagcataagagaaataaaattgcagaacaggtaaagagctgcctgcttctggttggtacggcgaaggcggctttctagttccgccatagttttgatcgatcttctttttctgttatccattacatatcaccactcatttctttgattgcgtttaacagtgtgtcatgaaaagcacttcttgtctgaatgtttttttcaagctgacggtagatatttccgtccttcagcaggatcacccggtcacagaaggaagcggaaaagctgtcgtgtgtgaccataaaaatagtagcgtccagattctgtcttgcattttcaaaagattcaataacgatcctgcttgatttgctgtccagatttcccgtaggttcgtcagcaagaagcatcagaggatggttgatcagacttcttgcaactgcggttctctgacgttctccgccggaaatctctgccggatatttgtttcggatatgactgataccaaaaagctccataagctgatctgcgtagcgctccccttctttgtccacattctgtcggatgattctgggaacaagaatgttttcacggacagaaagtccgtcaagaagcataaagtcctgaaaaacaaagccaagcttttcgttgcggacagaggcaagctgttccggtgtcagggagcttaattcctgtccgcccagggtgatcctgcctttgtcaaaagggatatagcaggaaatacagttaagaagcgtactttttccggaaccggagggccccattacagctacaaattcgcctttggcaacagaaaagctgattcctttcagcactgtataggtacgattgccggtagtataggatttttccagattttttacagataacataaaattcctcctcgtcttatgttaaaaatttacagatgttctgctgttgtgcttttaccataccacagaaaaaaacagccggaatccaggctgtaaagtttggcatttttcaggtaaagttttgcaggtctctgcggaagatgtaaagaatagaaggatttttgtaaagtttggcatgcgccggaagctgtggttgtggtatgataaaagaaatctgaagcgaggagcatcagtaaaggatataaaagcagcaggaggagatattatgctgagaatcgctttgtgcgacgatgaacaggaggccagggatcagctgcggtttcagcttgaaaaatccatatatgaaacggatgaggaaattgtatatgaattcagttcaggagaaactgcggtccgttggctgaaaaaacatccgggagagatcgatcttctttttctggatgtggaaatgaaagaaatgacaggcatggaggctgcggaaaggatacgggagttcgacaaaaccattcttcttgtatttgtgacaggatattccgagtatgtatttgacggataccggacaggggctctggactatgtgatgaaacctgccggggaagaacggatcagacagattctgtcaagagccagagaagcgttttattccagacgggaaaaagattttgtgttccagaatcaggagggaaccttccggatagctctggatcagatcctgtatttttacagcgacagaagacaggtgtatctggtaacggaaaacagagaatacgctttttacggaaagctttctgaggtacagtctcaggtggatgcacggtttgtgaggattcaccaaagatatctggtaaacggagatcatgtggagtatattggtcatgatgaaatccttacaggcggaaaaaatcttccggtaagccgggggatgaaggaagaggcgctgaaaagacttgcggagcttatgctgaagggggcaggcctatgagaaaaaatgcagagcttttgtttttgaccattgcctggctttcggttatgggaatctgtctgtttatggcagtgggacgcctgctgaaagtgaaaaacagcaaattcctcagaatgattcttgtgactgcctgcggatttttaggcggtatggtgatctatctggcagactggggaaatattgttcccacgtttgtattttttattgcagctattatgatctgctgtgagggaagtgtcataaaaaggctgacagtgggactgatgacagccagtacggtgttttcttttaatgcgctggtggataactggtcgccgttttatcagatgtatcagatcgtgataaaaatatttttttgtgcagggctgtggattttgatccggaagttgggaccggacagagattttgaactggcgccttccatgtggaggcttctttttatcctgacgcttcctcctttgggagttgtattcagtctggtgctgttaagcgattatgatactgcagggatctctgtccagtatctgtttctcctgcttttgtccctttcggcttttgcagggcttttatggaccatggtggttctggcccggcaacagaaactggaagaggaggctcttctggcagagcagaacagacggtactatgaagctatggaaaatcagcattttgagatcaggcgtttaaagcatgatatgacaaatcaccttcagacagcgctggctcttccggacgaccagagagagggatatctcagggagcttctggaacagacaggggcttcccgcactctgaaatactgtggagataccactgtgaatattattctcagcgccaaggctgctctgatggaacagaatcatattgactttcatgtttccgcagatatttctgaacctttgcccatggaaaaaacagatatcagcgctgtttttggaaatgccctggacaatgcgctggaggcagtaaaaaaacttcctgaaagccagcggagagtttccctggaagcaaggcagggcaaggggattctggcagtcagtgtgcgaaatcagggcagacttccggattcagagaaggaggagagacggaagcagaatccaggaatccggcagttttttccaagtacaacaaaatgtgacacaaaaaatcacgggctgggtcttcccagcattcaggctgcgctgaaaaagtacgacggaatgctggaattaaggcaggaaggcgaagaagtctgccttctgatctgctgctatatccgcaggcctttgtaagggttattgagtttccttttattatcctgtatactttataaacacactatataatgaatcagggagagagaacatatgcgtgaaaaactgacagaacgtgacgtacagaaaatccagcaggagatcgagcaccggaagctggtggtgcgcaaagaggccattgaagctgtaaaggaagccagagcccagggggatctcagtgaaaactttgaatattatgcggcaaagcgtcacaaaaatcagaatgaaagccgtatccggtacctggagagaatgctgaaaacagcggatattgttacagatacttccagagaagacgaagtcggcatggatgacattgtggaagtagaatttgaagaagacggagaaattgagaagtataagcttgtaacctctatcaggggaaattccatggagaacagagtgagcatcgagtcacctgtcggacgggctctgaaaggccacaaggttggggaccgggttcaggtaaaggtgaatgaaaccatgagttactatctgaaaatccgttctattgacaaaacgggcgacgagggagaagacatcagaagcttctgagaattttacataaatttaacattgcgctggggacaactttacaattgtttcttaaaatgaaaatatattaaattttcgtaaaggagaaatacaatggatttttttagtatactgacgatgctgggcggtcttgctctgttcctgtatggtatgcaggttatgggcgatggtcttgcgaagatttccggaggaaagctggagaaaattcttgaaaaccttacatccagcaaattaagagcagtgcttctgggtctgggtgtgactgcggtgatccagtcctcatctgccacaacggttatggtcgtaggtttcgtaaactccggtattatgaagctgacacaggctgttggtattattatgggtgccaatatcggtactacagtaaccgcctggatcttaagtcttgcaggtattgagagcaacaatttctttatgagccttcttaagccaagttcctttgctccgatcctggcgctgatcggaattgtgcttctgatgttcacaaagagctcccgcaaaaaagacattggcgctattctggttggatttgcagtgctgatgttcggtatggataccatgagcgctgctgtgaagcctctggctgatgttccggagtttaccaatcttcttctggcattttccaatccgatagcaggtgttctggcaggtacggttcttacagcgatcatccagtcctcatctgcatccgtgggtattcttcaggctctgtgcgttacaggagctgtgccgtacagtgcggctttcccgatcattatgggacagaatatcggtacctgcgtgacagcgcttctgtctgctatcggcgcaaacaaaaacgcaaaacgtgcagccatgatccatctgtatttcaacattatcggtactgtagtgttcctgagtgtattctatattctgaatgcagctgttcagttcccgtttatggactctatggcaacaccggcagcaatcgcagtgacccacagtgtgtttaatgttacagcaaccttactgcttcttccgttctccaatcttcttgtgaagcttgcatgtatgacgatccgtgattcttctgaggatgttgaggcggcaaaggaagatcaggaattccttattctggaatcccgtttcctggaaaaacctgcatttgcagtagagcagggaagaaccgcagcaagacgtatggcagaggattcctggaaggcgctgaaggcctcttttgaggtgcttcatgattacagtgaggaaaaggctcagaagatcacaaagatggaaagcaaggtagacaggtacgaggatgaactgggaacctatcttgttcagctgaacaataaggatctttctgagacagacagtcacagtgtttccatgatgcttcactgcatcggtgatttcgagcgtatttctgaccatgcagtaaacattaaagagtcagcagacgagcttcatgcaaaaggcctgagcttctccgtttatgcaaaggcggaactcagagtactgaccgcagcagtgaccaaaatcgtagaaacagcgttttctgtatttgacgaacaggatattaccaaggcttcagagatcgaggcgcttgaggaactgatcgatgagctgacaaaagaaatgaaacgtcgtcacatcaatcgtctccgctccggcgagtgtaccattgaaatgggcttcattctttctgacctgatcaccagtatggaaagaattgcagatcactgttccaatatcggtgtctgcgtaactcaggtgcgtgagaatctttatgatacacacagacatctgaacgcaatgaaaaacgatcaggatgatgaatttaataaatgtctggaagcagtccgcaaagaatatctgcttccgtaagcgtcagtaaaaactgaaggcagatcatataaggctgttgtgggaatttccggagggaaattcctcagcagcttttatggcatatatgaagataaggaggacagttcatgatctactgtgtggaagatgaaaaaaatatcagggagcttctggtatatacccttgaaactaccggatttacagcaaagggactggcagatggaaaagagctttgcgcagccatgaaaaaagaacttccgtccctgatccttctggatatcatgcttccgggtgaggacggatacggcattctgaccaggctgaagtcctctcctgatacaaaaaacatccctgtgatcatggttacggcaaaggatgcggaatttgacaaggtacggggactggaagccggagcggacgactatatcacaaagccttttggtatgatggagtttgttgcaagagtaaaagcagtgcttcgccggtgcagcaggaaagaggaaaacagagagcttcactgcggagaactgagaatatcggtgggacgtcatgaagtacatcttggagatcagaaggtggagcttaccagaaaggaatttgagcttttgcagtatctgatagagaacaagggacttgttatgagcagaaatcagatcctctgtcatgtgtggggatatgattttgacggagagacaagaactgtggacgtacatgtgagaacacttcgtcagaaactgagagaagcaggaaacatggtggaaaccatacggggagtaggatacaggatcggagaataaaatgagacagagaattttaaatcacggaagctttcttgtaatcctgtctgttcttctgacctttctggctgcaagctttgtcatgtatgacaagtttgacgtatttatgaaacagagtgtgcgggatgaggtggaatacattcgggccggtatcgaagcagccggactggattatctggaaagcaatgtaaaagagatcaatgctacaaggatcacagttacagacaatgagggcaatgttctgtatgattcggagacagaggcggatcagctggaaaatcatggggaacgcccggagtttgtgaaggcaaaggaaaaaggctatggggagatcgtaagattttcggaaactttttccgagcagaccttttactgtgccatgaagctggataatggaaatatccttcgggtggcaagaacaactgacagtgtgttccttactttattttccagctttacgctgctggggattcttatgctggggattctggccctggaatttttcctggttcagagacagacaaaggagctgatcgcgcccattaatgagctggatctggagcaccctctgaaagatgtaagatatgaggagctgcgtccccttcttgtacgggtagaccagcagaataaacagatcgcgtctcagctggaggagctgaaggaggctgaggcaatgcgaagagaattttctgccaatgtttctcacgaactgaaaacccctctgatgtctatttccggttatgcggagctgatgatgaacggaatggtgggagaagacaaggttcctgaattttccggaaggatttaccatgaggcaagccgtttaagttctcttgtgtcagatatcatccagctttcaaggcttgatgagaaaaacagcgacatgccatttgaggcagtagatatttatgagctggcagaggacattgtgtatcatctccagccttcggcagagaaaaagcagatcagtcttgttctggaaggggagcatgtggcggtgcgaggaatccggcaggttctttatgaaatgttctataatattgcggacaatgccatccgctataccgatgcaggaggaactgtccgggtgtttgcagggcaggaaggacatcatccatgctattttgtggaggataatgggatcggtattccgaagaatgaacagagacgtatttttgagaggttttaccgggtggataaaagtcattcccgtcagaccggaggcacaggactggggctttctattgtaaagcatggggctgcgcttcataaagcaaagatcaatcttgacagtgagcccggaaaggggacaaaaatggagctgatgttttagtcatcggctccattttttatgtctttttcagaattctgaggacgttcggagatggctttaatagaaagcgcgtactctgtaggcgtcattccgcagagttttttaaactgtctggaaaaataatgaatggaggaatagcccagaaattccgagatctgtgtgaaattcatgtcattttcccggattagctgtctggcaaaattgatcttcatatgagaaaaaaaatcgatcactccgcagccgtattcctcacggaagattttctgaagctgggatcttccgatgagattgtcatggcagattgcttcaagggaaagggattcacagatatgatcctccagataacgggtgatcctccggcaggcagaagattcaaatgaggggtcgcccatgtttctgacacagtgcggtacctgtgtagtatatcttcggagcatatgtatcagaagctgttccagataaagaacaagaagctgctgggaacccacagggctgtcttttcttaattccattttatgaagataggggtcgtcaagaggagaggcaatgcaccgccgggcctcagcgatgatttttccgatcagggttcgctctgtatccgaaagggtcagaatctgtttttcaaaaaaactcatacagggagaattacaggcaaaggaaacaactacaatattaggggcatgatttccggttgccgacaggttgtgaaattcgttgggacggtgaaaaattatctgaccgtgagtaaggacatgaacttcttcatctgcctgaatccgggcagttcctttatctacacattgaaattcccagaaatcatgctgttcacccggataggaaaagtcattgcagtattcaaagtaatggatggtataaattttttctacagaaagatctttggcaagaggtatactttcatatatcataacacggctgctccatagaaagtgataaggttttcggttccgtttttcttggaaacatacagatcagaatatgttcaggagaatgttacagtaactacagtctaacagatgccggtgctctgaacaatcaaaatatgagaaaaatatcaattagaagtaatattgtcgttgaatctgtaactcatagcaatatttctaaagtatacagcaatatataaattgaaaaagtaattttaatgagttattattaagaaaacaaaaagtttttgtatcttatgtacaaaatctaaaggaggatatgagatgaaagcaaaaaaaattaccagtcttgcactctcagcagttatggcagcaggcgcaatgtcaggaatggcaacaactgttatggcagatgaagagcagactctgaaactggctgttgtagaaaccgcatatggacaggatatgtggaaaaatgtttgcgcaaaatttgaagaggcaaatccgggagtaaaggtagaactcacaatcgacaagaagcttgaagatatcattacaccggctatgaaatccggtgattatccggatgttatcatgagagcagtgggatctgaatctgctcttacagaaacctttgttaaggacaataacgtagaggaaatgactgacgtactggaaatgacagtaccgggagaggatgtaactgtaaaagacaagatccttccgggatttgtggacaactctattacaaatccttacggagacggaaaaacatatctgatgccgatgttctacggaccttgcggactgttctacaacaaaggactgttcgaggaaaaaggctgggaagttcctgagacatgggatgaaatgtgggaacttggcgaaaaggcaaaagaggaagatattgcactgtttacatatcctacagcaggatactttgacgcattcttctatgcactgcttcatgagactgccggcgctgaaacattccaggaagctctgaaatacggcgaaggcgtatgggaaacagacggagcaaagaaaacatttgagatcattgagaagctggcttcctatacagagaagacaactccggcaaacgcaaatgacaatgatttccgtaaaaaccagcagctgatccttgacaataaggctctgtttatgccaaacggaaactgggtaatcggcgagatggcagacgctcctcgtgcagacggctttgagtggggattcacagcacttccggcagtagaggaaggcggagagagagcttcttattccttctttgagcagatctggatgccgaagggcgctgtaaacaaagaccttggaaaacagtttatcgcatatctgtactctgatgaagcagctgagatttttgcaaaagacggtggagcagttcagccgatccagggaatgacagacaaacttgagggcgatgcaaaaatttattattctatctatgatgatggtgcagtagctgttatggatgcttttgcgacaactgagccggtagaaggtgtaaccgttcgtacaacattctttgatccgatcaactctcttgtcagcggtgataagacagtagatgattgggtagagcagatcaaaaaagacagtgatacccttcgcggcgctttgaaataaagccaggatcctgacataattaaatatggtatctgaaaaaacggacggtgaatactaccgtccgtttttcgggataaagaaaggagaagaaccatgacgaaaaaaaagggaagaagccggtttattttctgctgtctggcgccggcagtaattctttttgctatttttatgttgatccctaccattgatgttttcagaatgtctctttataaatggggcggatatacagctgaaaaaacttttgtaggtcttgataacttcaaaatactgttacagagcgataaattttatcaggcgtttcagaactctgttcttctgatcgtgattgttactattgttacttttggtatggcgattatttttgccgctattcttacaagagaaaaactgaaagggcagacattcttccgtgttgttttttacatcccgaatattctttctgttgtagtgatcagcgctattttctctgctatctatgatccgaatcagggacttctgaactcctttttgaatctgttccggggacagaatggggtggacaatcctatcctctggcttggaagtcaggatcttgttatttacagtattattatcgccatggtatggcaggccattggatattatatggttatgtacatggcaagtatggcaaacattccggacagtctctatgaatcagcaagtctggaaggcgcgggaaggatcaaacagtttttctcaattactcttccgctgatctggactaatattcgtaccactctgacattctttgttatcagtactattaatatgagtttcctgatggtaaaagcaatgacaaacggcggaccggacggagcttccaatgtattcttaagctacatgtatcaggaagcttacaccaactcttcctatggatatggtatggccatcggtgttgcggtattcctgttttcctttgcgctggccgctgttctcaatgcggtgaccaaacgtgaagaaattgaattctaaggagggtgaaaaatggctgatatgacgaaaaacagtactgccagttccaaggtggcaaaagtatttatctatctgatactggggcttctggcagttacgatcattgttcctgttgcctgggtatttgttgcttcaattaaagagaattcagagttttacggaagtccatgggcgcttccgaaaggattccatttccagaactttacagatgcgtgggaaactgcaaacatgggttcttatatgctgaattctgtgtttgtaacggtcctgggtatcctgcttctgatcgtgatcgctcttccggcagcttatgtactgtccagattcaaatttaagagccagaagatctggaatgttatgtttatggcaggactttttattaatgtaaactatattgttgtaccgatctttttgatgctcaataatgcagacggaaaactgcgtcagtggttcggagagccgtttttcctgaacaatctgtttattctggcgcttgtatatgcatcaaccgcgcttccctttaccatttatctgctgtccggttattttaaatcactggcaaaagattacgaggaagcggcttatgtggacggagccggatactggagaactatgattcaggttatcatgcctatggcaaagccaagtattgtgacagtaattctgtttaactttttggcattctggaatgaatatattatttccatgaccctgctcaccagaccggagataaaaacccttccggtaggacttatgaatctgatggcagcccagaaatcagcagttcagtacggacagatgtatgcgggactggttattgttatgatccctacactgattttatatatctgtgtacagaagaaactgacacagggtatgactcttggcggtctgaaaggctgatcagtgtgcggaacaggaggtaaataaaatgaatgaaagaacaaagagtgttttaaaaaccgttctggcagctatattttttattatttgtgtggcgcttgtagtactgggacagaaaaatgtaggaccgcaggggctgttggtaatgcttctgggacttgccggactgattcttcttttatatctttataacagacaattcaagtgagactttgtacatgaatattacttataactggaaagaaaatatttcccggtgggacgaggctgttccgctgggaaatggaaaatgcggctgcctctgctggggcagtcctgaagagataaggtttagtctggaccgtacagatttatgggacagaactgttttgtgggagcagaataaagagtttacctggaaaaatcttgtgaaacttgcaaaggcaggaaatactgcaaaaatccgggaaatctttgatgctccctattattatccatcacctacaaaattaactgcaggcaggatcctgcttcatttttacggtattgacggagaaatcgaatctgtcttaaacctggaaacagcaaaagcggaaatgaggttcagaagccggaaagagactgtcaggatttcagcttgggtccatgcagtggaacaagttgggatcatagaggttgaagctcgggaaacggaattttctgtggaactgaaaaatccggaattcggagaaaaaggaacggaaaaagagtacgtttattgccaggaagaaagacagatttcccaggggaatctgaaggatctgaaatatcctcctgtgataaaaaaacaggagggagagctgcaatggttctgccagcctgtaaatgatgaattttcttatggagtgattgttgggagaagaaaaaaagactctgtgacaagaatcgtctggaagattgtctcatcagaagacggagactgctggatggaacagggaaagcagcaggttctcggcgctctgtcagcaggtgatgaactttttgattctcataaaaaatggtggaaggattattttgaagagagcggtatctgtattcctgataaatttatggaaaagcagtggtatatgaccaattatctgtttgcttcaacgtccagagaaggaggcgtccctatgcctcttcagggagtgtggaccgcagatgagggaacgcttcctccgtggaagggagattaccataacgatctgaatacagaattgtcctatacccattatctgaaggcaaaccatctggaagaaggacgatgctttttagattttctctggagtctttttgatgaggggcgacggtttgccggagaattttacggcgcagaaggctgctgtcttcccggaacaatgacaattgacgggaaacctcttgggggctggcctatgtattcgctttctccgtccaaccagatgtggcttgcccacgcatttggagaatattaccgatatacaggagacagtaaatttctgagggaaagagcttatccttatatgaaggaaaccgggatttttatccaatcgcttctggaggagacagaggacggttatctggttcttcctgtatccagctctccggagattcacgacgatacggaaagatcatggctgacacctgtcagtaattatgatctggctctgatgatccggctgtttgaaacactggagaaactggctggtgagctggggaaaacagaagaattacagtggcgccacatcagacagaggcttccggaactgtcagtcaataaaaataaggttctgatgctttctccggatgaaagtcttgaagaatcccatcgtcatttttcaaatgcgatggctgtttcacctctgggaatcatagattatgagggcgaaggaaaagaaataatcgatgctgtaattgcggattatgaaaggctgggcacatctcagtgggttggttatacctttgcatggatggcacatctttatgctgttcagggaaacggagaaaaagcagcagagtatctgaggattttctgggaaaatttctgcagctgtaatggatttcacctgaacggagattttcggaaaaaaggatattcgcagtttacctacagaccctttactcttgagggaaatatgttcagtgcagatgctcttcaggaaatgctgtttcagatgaaggatggaaaaatacggctgtttcctgctgttcccaaaatctggacggaaaaacaggtttctttttacagtttccgcggggaaaaaggaatcctgtgcagtgcggagatttttgagggcagaaaactgtcatggaagatttatacagagaattccgtatatattcagatacaatatcaggagaggctttgcggaaaaaaaagacttgaaccgggacagtggtgggaagagtcgctgatgctggagtgaaaagcattaaatatggcggagagaaacagagattttcatgaaaacaatctttttgtgcaaaagaaatagatgattatgcaaatactaattgtgtaaaaatgataaaattagtgttgcaaatgcatgtaattatataaaatgcacaatatatggagcttttatattgttttcagaaggcaggagttctgcaggcctttactctctggatttttctgtcagagaagattatcggcggtgtaacaggtggaacgaaaggctgatcaagaaaggagcagaaaaatattatgaaaaaaccggtattagtagttatggcagctggaatgggaagccgctacggcggtctgaaacagatcgatcctattgacagagaaggtcatattattatggatttttccatttatgatgctgtaaaagcaggatttgaaaaagtagtgtttatcataaaaaaagaaaatgaagaagacttccgtaacgctatcggcgaccgtctcagcaaacagattcaggttgcctatgtgttccaggatctttataatcttccggaaggctatgaggttccggagggaagagtaaaaccctggggaaccggacatgcggttttaagctgtattgacgaggttgatggtccttttgccgttatcaatgcagacgattattatggaagccatgcatttaaaatggcatatgattttctagctgaaaatcaggatgatgagaatctttacaggtatatgatggttggctacaagctggaaaatactctgacagacaatggtcatgtagcaagaggcgtctgtgttaccgatgaggcagatcatcttctgaagatcaatgagcgtactcacattgagaagcatggggaaggtactgcttatacagaggatgacggagctacctggaccatgctccctgaaggcagcacagtttctatgaatatgtggggattttctgcaagtatcctgaaagaactgaaagcacgttttgcggcatttcttgatgagaatctggagaaaaatccactgaagtgcgaatattttcttccgtttgcagtggacgagcttcttcaggagaaaaaagccacagtcaaggtgctgaaatcagaggataaatggtatggggttacctacaaagaggataagcctgttgttatggctgcagtgcagagcctgaaagatcaggggctctatccgcagaacttatgggaggagaacaagtaacagtgaatacaattcagaaagaagtaatcagtcagtttgaatttccgggagaggtagtcgaatgtgttgcctacggaagcggacacatcaatgatacatatcgtcttacagtaaaaacgccgggcggacaggagaagcactttattctccagagaatgaataaaagtatttttacaaagccggtagagcttatggagaacgtgcagggcgttaccgcatggctccgtaaaaaaatccgggaaaacggcggtgatgtggagagagaaacgctgaatgtggtaagtgataaggatggaaacccttattatgtggactcagagggagaatactggagagtgtatctttttattgaggatgctaccagctatgatatggtaaaggatgacaatgacttttatcagagtgcagttgcttttgggcatttccagagacttcttgcagattatcctgctgagacccttcatgaaaccattgtgaatttccataatacggttgaccgttttgcgaaattcaaggcagcagttgaggcagacagtgaaggccgggctgcatctgttcaggaggagattaagtttgttcttgacagagaagagctggctcataccctgtgcgatctgcaggatacaggaaaaatgcctcttcgtgtaactcacaatgatacaaagctgaacaatatcatgattgatgacgagacaggcagagcaatctgtgttattgatcttgatacggttatgccgggactttctgtaaatgatttcggcgattccatccgttttggagcaagtacaggggcagaggatgagcaggatctcagcaaaatttcctgtgatcttcatctctacgaagtatatacaaaaggctttatcgagggctgcgcaggcgcgcttacagatatcgagctggatatgcttcccatgggggcgatccttatgacttttgagtgcggaatgcgtttccttactgattatctggagggagatcattactttaagatccacagagaaggccataatctggaccgctgtcgtacccagtttaagctggttgcggacatggaggagaagcttcctcagatgaaagctattgtagaaaaatataagtagtggtatactgaaactgactttggggaaagctgagacagtttttcccggatccggtcaatgactgaaaacctgaagaggaggacaaaaacatggcaattttagttacaggaggcgccggttatatcggaagccatacagttattgaacttcagagcgcaggatatgatgtagtggttctggataacttaagcaattccagtgagaagagtctggaaagagtagaaaaaatcacagggaagccagtgaaattttacaaggcagatattcttgacagagaagcgctgacagatatttttgaaaaagaggatattgattcctgtattcattttgcagggctgaaagcagtaggagaatctgttgcaaagccgtgggaatattatgagaacaatattgccggaacactgactctcgtagatgtaatgagaaaacatggtgttaaaaatattattttctcttcttctgcaaccgtatatggagatcctgcaattatcccgattacagaagaatgcccaaagggacagtgtaccaatccttatggctggacaaagtccatgcttgagcagatcctctctgatattcagaaagcagatccggaatggaatgtagttcttcttcgttatttcaatccgatcggagctcataagagcggaactatcggagaaaatccaaatggtattccaaacaacctgatgccgtatatcactcaggttgccgtaggaaagctgaaagagctgggcgtgtttggcaatgactatgatactccggacggaactggcgtgagagattacattcatgtggttgaccttgcaaaaggccatgtaaaggctcttaaaaagattgaggacaaatccggtttaagcatttacaatctgggaacaggaaaaggctacagtgttcttgatattgtaaagaactttgaggaagccaacggcgtgaagattccgtatgtgatcaaagaacgccgcccgggagatattgcaacctgttattctgatgcgtccaaggcagaaagagagcttggctggaaggcagaatacgatattaaggacatgtgtgcggattcctggaactggcagagcaagaatccaaacggatatgaagattaatcatcagtcattaaacatgaaatactaaaaaagaagtccccagagattctgaaagatcctggggacttcttttaaacttaaatttatgtttgtgggagggggatataatttcctctgtaaatgacatgcgggggcaggtgaatctgtcacagaagctggttcgagactcggaaagttctatgcttctgcttctctgcaaaaaacacttccccgaatgctgaactcgtctgcgactcagacagcagcattcggagaagcaaagcagagccacagaaggcaagaacttttgccaagtctctcaaggcttcttatacagattcatctgcccctgcattgtattttccagatggtaaatttatatttccgcagtagctggctgccgggcaggctgcttcggggcgcagtgcgctaatcgcccggccggaggccaagtgctgtgtggaggatttctgtttggctgttatccactttcagatgcagagagaaaggcagaatcatagtgccttgcgaggcttccgtcggtaagcctgtgccagctgctgccatcgagcacgttgtctgagccgtcaggcgagttcgtgcgaatggcagcaaatcagcgcacggggttaccaggaaacgcagcgcagcacatgctctgccttttcttctctgcatcgtctgtgggcaacaagaaacaaaatccttccctcacagacatttatttatcgtcatcctctgacttctttttttcaaatttcggctcgcaggtaagctcaatgcccagtttgcggaattcccagatatctacggaagacagcataacagaagtatgagcttggcatctttttaacttgggaagctgttccagggcaagtcctgcttccggattgcttgcggcgcttacagaaagcgcgatcagagtttcgtctgtgtgcaggcgtggatttttgctgccaagatatttgatcttcagctcctggatcgggcggatggcatcaggagagatcacgtgatgctcatggtcgattcctgcaagctcttttaatgcatttaaaagaagcgctgaggaggctccgagaagatcagaggtttttccgtaaataatctttccgtccggaagctccagagcggcggcaggagctgttgttttcttttccatggaaagtgcggcaggaacaaccttacgatcttcaatggatgcatgagcctgtttcagaagaagctcgatcttgcatacctcatcttcttttcctgtgccggatacaagagcgtcgcagcttttatagtagcggcggatgatttcctgacgtgaggcctctttgcagatctcatcgtccacaatgcagtttcctgccatgtttacgcccatatcagtaggtgatttataagggcattcacccatgattttttcaaacattgcctggagtacagggaaaatctctacgtcacggttgtagttgacggttgtttctccataagcctccagatggaaaggatcgatcatatttacatcgttcagatcagcagtggctgcctcatatgccagattgaccggatgcttcagcgggatattccagatcgggaaagtctcaaatttggcatagccggcacagatcccgcgcttatgttcatgatagagctgggaaagacacactgccatttttccgcttccaggtccgggagcagttaccacaacaagaggtctggtagtttcaatgtactggtttttgccgtatccttcatcgctgacgatcacagaggtattgcttggatagccggggatgttgtaatgaacaaatacacggatgccaagcttttccagtctgtttttgaaaagatctgcgctttcctgtcctgcatagcgggtgatgcagacacttcccacataaagacctctttctgtaaaaacctcgatcagacggaggacatcctcgtcataggtgattcccagatccccgcggactttgtttttatcaatatcagctgcactgatcacgatcacgatctctgcctggtcgctgagctgcatcagcatacggagcttgctgtccggttcaaaaccagggagaactctggaagcatgataatcatcaaaaagcttgccgccgaattccagataaagcttgttatcaaacttgctgattctttcacggatatgttctgactgcatggtcagatatttttcgttatcaaatcctgtcttcatatgtttattcctttcccgatttacgttataggcagagagatttttgttgctgttcactttgttcccggtaatcttgcaaaactgtatttcagatcatccggtgggataataatctgtggacagttgtgtttttctgtttaccgtgacagtaatacaggatcctctgccgaactcatgcagatagtatactacgaacaactggcggatgcaaaacctttttttataaggctaattttgttgatttatcatagaaatctctttataataaagaagacagtagaggaggaataaaatgaacgaaaataaagacaatcgtccggatggaaacagaccggaccggaatggtcccgggaatcagggaccgaataaaaaccgccagacgattctggcgtttctgatctgtcttctggtgacactggtatgtcttagttttattacagaaataagaaatggaggcactggtgagatcacctatgacaaatttattgaaatggtagacaaggatcagatcaaagaggtaactcttcagtctggtattctgacagtggagccgaaacttcagggttcctcttataaaaaaatgacctaccgtgttaatcagatggagaatatcgatgctcttaccaaacgtctggaaggaaaggatatcatattcaaatacgaacagccggatgctctgatggaggccctttccatgctgctcagtattgttcttccgacagttgtgatgttcggtatgctgatgttctttatgagacgtatgaacaggggaaacggaggcattatgggcgtgggaaaaagccgcgccaaggcttatgttcaaaaggaaacaggtatcacctttaaaaatgtggccggccaggacgaggcaaaggagtctcttcaggaggttgtggattttctgcataatccgggcaaatatacggctgtgggagccaagcttcccaagggtgctctgcttgtgggacctccgggaacaggaaagaccctgcttgcaaaggcagtggcaggagaggcaaaggtaccgttcttttctctttccggttcggaatttgtggaaatgtttgtaggcgtgggcgcctcccgtgtccgcgatctttttgaggaggcaaagaaaaatgccccctgtattgtatttattgatgagatcgatgcaatcggaaaaagccgtgattctcattatggaggcggcaatgacgagagagagcagactctgaatcagcttcttgcggaaatggacggctttgacacatccaagggacttctgatccttgcagcaaccaaccgtccggaggtccttgatccggcgcttctcagaccgggacgttttgaccggagagttatcgtagaccgaccggatctgaaaggccgtgtggaaatcctcaaggttcatgccaaggatgttcttcttgatgaaaccgtagatctggatgccattgctctggcaacctctggggcagtaggctctgaccttgcaaatatgatcaatgaagcggcgatccttgcagtgaaaaacggacgcaaggcagtttctcagaaggatcttctggaatcagtggaagtggtcctggtaggcaaggagaaaaaagaccgtattctcagccctcaggagcggaaaatcgtatcgtatcatgaagtgggccatgcccttgtaagtgctcttcagaaggacgcagagcctgtacagaagattacgatcgtaccccgtaccatgggagcgctgggttacgttatgcatgttccggaggaagaaaaattcctcaatacgcaaaaagaactggaagcgatgctggttggatatcttggaggccgggctgccgaggagatcgtgtttgatacggtaacaacaggagcagccaatgatatcgagcaggcgaccaaggtggcaagagccatgatcactcagtacggtatgtcacagaagtttgggcttatgggacttgcgtcacaggaaaatcagtatctttccggaagggcagtgctgaactgcggagatgatacagcaacagagatcgaccatgaggttatgaagcttcttcatgattcctatgaagagtccaagcgtcttctcagagggcacagaacagctcttgacaaaattgcagaatatctgatccgtaaggaaactattaccggaaaagaatttatgaagatcttccgggcagtggaaagaggaatggagattccggaaaacctggatgaactggtatttcctgaggatgtaaaagagcttgaggacaaagctgaaaatcaggaaacggaaatttctcagtcacattcagcagaaacctctgtttcagccgatgagctttccggggaggaagaaactgtaagttctgaggcggaaccggaaaataaaaatcagaaatccgtcagcatggaaactgaaccggcagaggaaggcgttcagggagagcagaaaaaagaagacagttcggtttccgaagacgatcagaagcagcaggagtctgagcatgtttcagattgaggaagaattaaaaaagcttcccgccaagccgggcgtatacctgatgcatgatgagcgggatgagattatttatgtgggcaaggccgtcagcctcaaaaacagggtgcgccagtatttccagagcagcaggaacaaaggcgcaaaaattgagcagatggtcacccatattgcaagatttgaatatatcatcacagactctgagttggaggcccttgtactggaaagtaacctgatcaaggagcacaggccaaagtataataccatgctgaaggatgataaaagctatccctttatcaaggtaacagtccaggaggcctatccccgggtactgtttgcccgcaggatgaaaaaagataaaaaccggtattttggcccctatacaagcgcaggggctgtaaaagatgtgatcgagctggtgcggaagctgtaccaggtcagatcctgcagcagaacgcttccaagagactgcggaaaggacagaccctgtctgtattaccatatgaaacagtgtacaggtccctgtacgggaaacgtgtctcaggaagcgtacagagaaaatatccagaaggtactgaaattcctcaacggagattttcaggaaaccatagatgcccttactgaaaaaatgcaagaggcgtcagaagaaatgagatttgaagatgcggcagagtgccgggatttgatacagagtatccgtaagatcggagaacgccagaaaattacagcctatggagaggaagacagggatatcattgcagttgccatggatgaaagcctggatctccgggaacaggatgcagttgttcaggtattctttatgcgaagcggcagactgatcggacgagatcatttttatcttcgtgtggcgcggggcgatacaaaatctcaggtgctttccagcttcctgaaacagttttatgcgggaacgccttttattccaaaagagatcatgcttcagacagaggtggaagaccgggaagtgatcgaggagtggctcagttccagacgaaaacagagggttcatattattgttcccaaaaaaggcacaaaggaaaagctggtggagcttgcccgtgagaatgcccgcatggttcttgataaggaccgtgagcgcattaaaagggaagagggcaggaccatcggggctgtccatgaagtggaggaatggctggggctgaaaggaattgtccgcatggaagcctttgatatttccaatatcagcggttttgagtccgtaggctccatggtggtctacgaaaagggaagaccgaaaaaaagtgattatcgtaaatttcgtatcaaatctgttcagggaccaaatgattatgcaagcatggaggaggtcctgaccagacggtttacccatgaaaccagcggagaattcgacagttttgcccgaatgcctgatctgcttctgatggacggaggaagagggcaggtaaatattgccctgggagttctggaaaagctgggaatccggattccggtatgcggaatggtaaaggatgaccaccacagaacaagaggactttattttaacaacaatgaaattccaatagaaacaaacagcgaggggttccggctgatcaccaggatccaggatgaggctcatcgttttgccattgaatatcacagatcccttcgcagcagggaacaggttcattcggttctggatgatattccgggaatcggagagcgaaggagaaaggccctgatgaggcggttccggggaattgaaggaatccgggaggcatctgtggaagaactggcagaaaccgaatccatgaatgccgcaagtgcaaaacaggtatatgatttttttcatttaccggtaaaaacagagaaaactcagcagaatcattgatctgagcataaataaagaaaaggagaacatatatgaagggtgtattgatgaccaagatggtacaggagcagaatcttacaaatcttactcctgaaattgatctttctgacaaaagaatcatgactgcagaaatcaaccgtcctgcgttgcagcttacggggtatctggagcattttgccaatgaacgtgtgcagatcatcggctatgtggaatatacgtatctgatgcagcttccggatgacaagcgcctgatgaaatatgaacggtttatttccagcaaaataccgtgtgttattttcagtactatgacaaaaccgtcgcaggatatgctggatcttgcagttaagtataatgttcctacttttgttacagaaagaacaacttccagccttatggcagagatcatccgctggctgggcgtacagcttgcgccctgtatttctattcatggtgtgctggtagatgtttttggcgagggaatcctgatcacgggagagagcggaatcgggaaaagtgaggctgctctggagctgatcaaacgaggccaccgtcttgtcagtgatgatgtggtggagcttcgtaaggtcagcgacgtcactctggttggttccgcaccggatatcacaaggcattttatagagcttcggggtatcggcattattgatgtaaaaacgctgtttggtgtagaaagcgttaaagatactcagtctgtggatctggtgatcaagcttgaggagtgggaccgcgacaaggaatacgaccgtctgggacttacggaggagtatattgagtaccttggcaacaagatcgtatgtcattctctgcctatccgtccgggacgtaatcttgctgtgatcgtagagacagcggcagtcaaccacagacagaaaaaaatgggttataatgcagctgaagagctgtataagcgcgttcaggccaatattgccagaaagcgcgataaataataaaaatgcaggaaaggggaaacaacatgtattgtttcggtattgacgtagggggaacaactgtaaaatgcggtctgttccagacagatggaactctggtagaaaaatgggagattcccacaagaaaagaaaataaaggtgagtatatccttccggatgtggcagaaaccattcagaacaagatcagtgaaaaaggaattgacaaggctgaggtagccggtgtgggagtcggtattccgggacctatcaacgctcagggagaggctgcatgcgcagtaaacctttactggggcttcaggccggttgcaaaggaactcagtgagcttactgggctgactgcaaaggcaggaaacgatgctaatgttgcggctcttggagaggcatggaagggcgctgcggcaggatctcagaatgtgatcatggttactctgggaaccggagtaggcggcggtatcatttcagacggaagaatcgtggcgggagctcatggagcaggcggagagatcggccatgcaaacatttgtcatgaggagacagcagcctgcaactgcggaaacagtggatgtctggagcagtatgcttctgcaacaggaattgtccgcctggccaaaaaggctctggcagaaagcagtgaggacagtgtgctcagaaatacagagagcattgaggcgaaggacgtactggatgcctttaagtcaggggatgctcttgctgtccgtgttatggatgaagtaggcgaaaagcttgggggagctcttggcatttttgcggcagtagtagacccggatgccattgttatcggcggaggcgtatcaaaagccggacagccgctgatcaatctgattgagaaacattacaaaaaatatgcattttccctttgtaaagatactcctatcgtaattgccagccttggaaacgatgccggcatttacggagctgcaaagatggtactgtaaccgattctatactacatttgcaggtacagagctgcaggaggattcagcagattcatagaaatataaaaagaaggtttcccaatacggaaaccttcttttttgtaaggtacgcttatggggcgcaccatttttatctggttattctataatctcaccaccgccggcatcaccgccgccagtatcgccgccgtcggtatcaccgccaccgacatcgccgccgccagtatcaccatcgccggtatcaccaccgccggtatcaccgctgccggtgtcatcgcctccattgccttcaccgccggcatcaccattatcagtatttccatcaccctgatctccgttttcgtccggattttccggagtaagagatggctcaggaatgattgtttcatcataggtgtattccggaatgactggttcgggttcgtagaagtgttcttcacagtaatcagtaggaacatcacctacatcaaagaattctgtgatcacggaacagccggatcttggaagcagtcctgtatcagcacatacacttattttttctacagtagacggcatttcaaaatctttgtcctcaagtccctcatggatccgtgtcatgaccttgcgccacatatctttgtggaagtcacgggaataatcgtcagggagcttttcattgttgtcaaatccggaccatactgcacaggtgtaatatggagtgtagcctacaaaccacaggtcattgtaatcatctgtggtacctgtctttccggctactgtcatattgtccagctggcaggcagttcctgtaccgctctttacaacgtcctccatggcgcttgtgagaagccatgcagtgctttctttaataacagaacgttcagcagaagttttttcaatcagcacattgccgttgtgatcaaggatttttgtgtaataaagaggttcaatgtaattaccctggttggctatggcagcataggctgcgcaaagctctacgtttgttacaccgtgagtcagaccgccaagtgcaagaggaagattggcgtctgtccatacagttccgttggcatctgtatctgcctctgttccatgggcaagagttgtgaaaccaaagttatccagatactggagaccaagctcaggagtaacctcctccagacatttcactgcaactacgtttatagagttccggatggctctccggatcgtggttgttcctccgtaggttctggaagcattttctacaggggagccgtccggatagttatatggctcgtcttcaaatgttgtggccagtgtcatgcccttttcgttaagagcaggagcataggtggagacaaccttgaatgtggaaccgggctgtctggtggtatctgttgcgcggttcagagtaaggctggcagttttttcaccgcgtccgcccacgattgcctttacatagccggtatgctgatcaatgacgctcatggatgactgaggctgcggcgcaaagttcacacgttctgcaacaaccttgcttccgtctgcaagaacagactgtttgtaccggtcaacataggcctgggcttcttcctgagaatcaaacagaagatcgaactccggatcctcattctggaaatacagagaaagcatttccttgctgtaattgacctcctcgccttgaggattggttacagtcagagcgtaatcaagagcatactgaacattttccggatagttttccgggttggcatattcttcatcaagaatagactggatatgctgatcctgggtggtataaatcttaagacctccgctgtaaacaaggttctgggcctgagttcttgtatagcccttgatgttcataagatcgttgatcacctggtcaataagctcgtcttcaaaataactgtaaattgtgtcggctgattcagagttctgagcctgtgccgcctggatctgcgaataaatatcgtcattgatcacctgatcatactgttcctgggtaatatactgctgatccagcatatgatccaggacttctttacgtcttttggcatttgcctccggatgctcgatagggttgaactgagtaggattctgagtgatgcctgcaagtgtggcacattcagaaaggttcagatcccacacatccttattaaaatactgtcttgccgctgcctgaacgccgtaggcgcctgcgcccaggttgatggtattcaggtagttttcaaggatcacatttttgtcattgatcttttcttcgatctgaatagccagatactgctcctggaatttacgagtgaaccgttccagccaggtggactcattggtccagttggtaaacacattgtttttcagaagctgctgggtaatggtactggcaccctcggagagtcctccggaagtgatattttttacgaaagcacggaggatacctcttacgtcgattccgttgtgctcgtaaaaacgttcatcctcaatggcaactaccgcatgctgcagatccaccggaatctgttcgatggaaacaggcagacggttggagcttggcgcagtcagcttacgcagctggtttccgtctccgtcatacaaaaaggttgcatatcccagaggcgaaatatccacgtcatctgcatcaggggcattatctatgattccccgaaaggccccgatgcccaaacagcctacaatcacacagagcgcgatcagagatatgaacagaactctgataaacgaaacgtgtgcacgttttcccatcatggctgtacgggaaatcagagaatttcgcttttttgagactgattttttaccgtaattcatgattttcctcctttataatccgttctattatatcaaataaaaaatagtaaataaaccctaaaatcaaaacttcatatttagtatagcagaaaaatgaaaaaatattgtaattttcatatgcgtgcggaaagaaaaaagctataatagatattactgctcactctgctcccggtaacctggctgatatgcactgcagatcatttttgctggtggcattttagtctgtatgttttggaattttgggaaaaacaggccaaaacatttcgcgggacagtactgtgtgaacagtgattaatcgatgcttggtacagcatcattttatacaatataaagtcaacagccggaaaagcagaaaaggtggacgaaaatggaaacaattatgatcatagaagacgacagacgaataagggaagagctttccctgcttcttataagcgccggatacacagctctggcagtgacagaatttacagaggaacccataaagcttctgaaagaaaaccatccggatctgatccttatggatatcaatattccaggcggcagtggagtaagtctgtgcgcccagatcagaaaaatatcccaggttccggtgatttttgtaacagggaggaccggggcaatggatgaactggaagctttgatgacaggaggagacgattatattacaaagccataccaggcgcctgttcttctggctcatatcagggcagttctcagaagaacaggaaaatccgggactatgcaggaggcagagcttgagtgcagaggtgtcaggctgagtctgaaagatgcctctgtaacctttcagggaaagaggcaggagctgacaaaaacagagctgaagcttctgcattatcttttttccagacagggagagatcgtcagccgcgaggagatcattgatgtgctgtgggatcagcatgtgtttctggatgataacgggctcagcgtgaatattacaaggatccgcaataaactgaaagcactgggggcaggacctgttattgaaacaaagagaggactgggatatctgttatgaatttaccggaatatctgaaagacagagcgcttgtttatctgggcaggattttgtgcatgctgctgctttccttttatcttctgtcagtggggaaccggttggataatgtgatattgatcctgatgttctggctggcgctgacggctgtatgtgagactgtgcgtttccttcagagaaaaaagaactttgaacgtattttgcagactctttctgagctggataagccctatctgatcggcgaggtggaaagccccctgaataatctggaagggaaaaagtactgggaaattttaagaaaatccaacaaatcagtgattgaaaaagtcaatgaaacagaggatgaaatgaaagattacagggagtatatagaaagctgggtccatgagatcaagcttcccatcactgctctggagctgatggttcagaaggaagagccaaagaaaaagaaccgtcttatggaagaactggagcggattgacaattatgtggagcaggtacttttttatgccaggtcagagcaggtatatcaggattttgtgatttcagaaacagatataacagaagtgatctatgaggttatggcaaaaaacaaaggacttcttattggaaatcgggttgcagtgcaggtagaaacagaaggaaatctgcttttgtgcgatggaaagtggatgagctttattctgcagcaggttattacaaacgccgtgaaatatatggattttcaaaaggagattttccggatccatatttatataaaggaagatgcagacaaaaaagagctggtagtagaggataatggagtgggaatttcacccggagatattggaagagtatttgagaaaggatttaccggagcaaacggacgggctgcggataaaaacagtcttatggcatccacgggaatggggctttatctgtgcagaaagctttgtgaaaaaatggatattgggatcagaatagaatcagaagagggagagtatacaaaagtgctcttttgttttggaaaaagtacttatctgacaaaactgtaagatttatgcaagtaacttcgataggagcagccggacagctctgatataatggcagcatcaaaggaaaggacaaaagacttatgagtggaaaaatccgggtatgtgatattgaaaaatattacgggaataaaaataatcttacaaaggctgtcaaccgtatcagctttcaggtacagaacggagagtttgtagggatcatgggagcctccggctccggaaagactacgctcctgaatcttctggcagctattgaccaggtgacggcaggccatatttattatggagatatggatattacggagcttccggacaaaaagcttgcagatttcagaaaagatcatcttggatttgtatttcaggatttcaatcttctggatacgctgactctgaaagaaaatattgtgcttgcaatggctcttcacacaaattccaggaaaaaaattgaggagcgggtatcggcagtgatgaaaaggctgggaatctatgaactccggaatcgtttcccctatgaagtctccgggggacagaagcagagatgcgcctgcgccagagctctgatcaatcgtccggatctgatactggcagacgagcctacaggggctttggattccagatctgcacagatgcttctggaaacctttactgccatgaacgatgaaatgggagccaccatccttatggttacccatgatgcgttttctgcaagctactgcagccgcattctgtttttaaaggacggggagatttttcatgagcttgtaaaaggcgcggagagcaggagagaatttctcaatgagatcctggatgttctgtctctgacaggaggtgaaggatcctgtgagtaaaacggaagaaaaaggaacacagagaaagtcgcaaaatcagcggaagagttccggaaaagcgggacgggagaaaaccggatctcccagacagtacggagaaattttccggacacttaccagaagaaatgccagccggtctttccgtgattacggaatttatactgccacgctgacagcagtgtctgctttgatgtttgcatttcattcactgatgttttcggaggatattctgaagctctgtgaggacggcggactttttattggaagtatgatcggagccgctgcattttttattgtatttatcatggcatggctggtgggatatattgtgcggtttatggcaaaccggcgcagcagggaatttggtacttatctgcttctgggtgtatcgggcagacgtctggcaggtatgtttatccgggaaaacctgattcttggaggaattgcctttgctctggggctgcttccggggatgttttttcagcaggtgcttacgtccatgtttatgggaaccatggataaggcatatcacctgaaagcagagatttccatatggaatatccttctgacgctgggaatctatctggtgatattctggatcgctcttttgcgggcaggaagaagactgaaaaaactgaatatcagagaactgatgaacgcagaaagagcaaatgaagaaatccgtcagaaacatatttctgaaaaaacgcttctttttcctatggctgtgatctatattctgatttttatgcttcttttatggaacaacagaatcaacaatgcaaatggaattcctctgtgcctgggactttttggttccgtatatcttctgtacacaggaattgcagcaactgtgtgccggtatgcagacaaaggcgggcgaaagatctacaagagcgccaatgtatttctgatcaggcagttttcctccaagatccgtaccatgcagtttactatgggaaccctgacggtcctttttactgtggctcttcttgtaagcagtattgctcttatgtttatggactatcagatcaatatgatggaacaggaaaatccttttgacattttgctgttcagtccggaaacagaggacagacctttattggaagaaaagcagaagcttctggaggattttggagaaattgaggacgtctatgtttactccatttatacagatggagacacagatatgaatgatttcttttatgacaatcttccgttctttcaaagagaaggatatgaggatctgacagcagagggagagaacccatcgtatttttcctgtgacacatacatgaagctcagtgattataattacctgagaaaggcggcaggatacaggacggtttccttagaggagggaacttatctgatccatgcaaaaacaagggtaaaggaaactgcccaaaaggcgctgaaagaaacgctggttcttccaaacggagaaggactgaagggagcagagctttacacggaaggattctgccagtcagggttaaacggatcagattatctgatcattgtcagcgatcaggcggcagaaacactgacaccgtactattcccttctggaggctcagacctccggagtcatgaaaacaggagcgctggatgctctggacagtgcagacgaaagttatggtaaaaggacgcttggaaattcgggaatgacttatgaggatttttactgggctgacggaacggatgaaatatttgtatatatggcagaaaattttgtcaaaggggaaattcttgatactatgaatttcattattacagtagtggcctatgcatgtatttatacagcggtggtatttctctgtgtggctctgaccgttctttctgttcagcagcttggagactccggaaaataccggtttcggtatgatacgctcaggaaactgggacttcgtctggaagaaatacacagtgtaatacggaaacagcttttgatctactatatgactccgtttgtggtttctgcagtgataagctggatcatagtgaagtacatcagtgattcctttgttttttatacagggatccgccagaacagtattctgtattttgcaggggcagcaggggctgtggcagttctgtttttgatttattttgcagctacttatattggatttaagaggaacatagaagagaagaaaatttgctgaaaagcgataccgtgtaagcagtaaccttgcattttgccctgtatgtcccgggattctggtacatatgctaaaaaatttggccggatagtgggatgcgaatagtaataaaaaagtctctgtattgtaattttatgtaaaattggttacagtacagaggcttttttatgatataatctcatagagaattgaaaaaaataccgttttcgggtctgaaaaaataagagaagaaccggataagggaggctatactgtggaacaaaagaaaacagcagatcatccagcatctgaccgtcccagaagtccggctacagaggccagaataaaggagaaaaacagaagaatccttatgacagtttctctgtttgtatttctggcggccggaaactttctgatgagggaaaatgatagatggaagctgagggagacgacagtcattcccacagcagtgatcgtagaagggaaaacgacggatcaggctcaaagtgacaaagaagatacttttcccctgagcgtggaagagaagatttttgcagaaccgtcaaaatatccgtcaagctttctggatgctttgaggcgaaatcctgagattgcggattttgtagctgcatatccggatacggagcaaaaagcattcggaggaatccgggaatcagagctgccggaaaaggttccgctttttatccagtgggacaaacgctggggctatgtgccttacggacagtccaatgtggggatttccggatgcgggcccacctgtctctccatggtgctgtacagcctgacaggagataaaaatcttactcctgatatgctggcgcagcgggctatggaggacggttattatgtggaaggggtgggaacctcatggctttttatgggggatatcgccagggagtatggaattacagttaatcagttcccttctgcggatctccgccaaatggaagagaccgtggacaacggggggctgatcatctgcgccgtgggccccggggattttaccgatgagggtcattttattgtgatcagggggatttctgacggaatgcttacaattaacgatcctttcagcaaagccaacagcagaaagaaatgggattacaatacggtggcgcctcaggtacttcaggtatggacttatgcggcacagtaggaatactttgcggattcgggatgaatttagttgagagtatctgcctggatattcaacaaagatcggtaatgagaatgccggattgagtgaccttggtataatgaaacggtgcataaataaacagagtattcagggtggaaaatttaaagagtgtggaaggtgaacgatatgaagagaaaaataaaaacagtgcttgtacttatcagtgctataagcatggcttttttgccgtgtatgacagcaacgccaaaagcagattcatcgcttactgttttgtataaccaggaacatctggaactgccggaggatgcgctgataactcagaaccaggtaattctggtttccgtggcagatctggcagagaaacttggggcaggattttattataataatcaggatgcttacgcaattcagtatcagggaaaaattatgtttgtaaaaaaagatcagtcagagatccaggtggcacctgaacaggatccagaacagcgagaaacctgcgaaatgcagattcctgcatcgtttgcggatggaaaactaatgatttcctttgaagaatttgcaaaaatatttggaatgaaatggcagtatgaggaagaaacgcagacggttactctgacggatggggaaaaagaagatgtgtcacaggagagtgaagctgaagatactggaagcgctcaggtgaacatctatgaacaatacaggaaattgattgtagaatatgaagaaagatatggagcaattcaggaaactgaccggggagatgggcagtatattctgggtggtctgtgctttatgaaactggtggattttgatcagaatggatcagatgagctgcttctggtttatcaggatgaggtacagaatacattttcaggccattatacatttgaagtgtggggagaggaaatagcttctggaacgtcatcaattaatatgctggattcaggtgaactgtatctgacaaatggcggtattcagacattgacgctgacagaatataataacgaaagatatctgctcacgggaatggctgatgatggtgcggtcaatgattatcatggttatgctgaggggaaatttggaatagtgcgcgaggcaaaaaaacaggcaggcaacggaggacttacatacagcatcaatggaaatatagttgacgaagatcagtggaaagcagaagaagaggcatggcaggcttcaaaaatcacatatagagtgaattatggagattattcaaatattatccagacagttcaggagacaaaaaccacacttgatataagctcatcttcacagcctcaggaagatcagggaacggatgcagcggcagactacattttaccggacagttctcagaaaaaagtaactcaggagcagcttgcaggactgacaagtgagcagctttcacgggcgagaaatgagatctatgccagacatggacggagatttaaaactccggagctgcagcagtattttgacagcaaagaatggtatgttcctcagtattcgccggaagagtttgacaaaatagaggattctgttctcagcgaaacagaaaagtataatctggatcagatcaaggctgtggaaaaacagaaatcctgaacacagaaaataagacagtaaatataaaacaggagaaaagatttatgctggaaacctataaaaccatattagagggcggctgtggagagatcacagaaaaaaagtccagatttatagcaactgtgcgcccggtaaaaactgaggaggaagccctggcatttctggaagaaatgaaaaaaaaatactgggatgcaaggcataactgctttgtgtattcggtgggatcaaacagggaatataccagatgcagcgacgacggggagccctccggaacggcaggacgtcctatgctggatgtgatcctgggagaagatatttataatgtggcagtggttgtaacaagatatttcgggggagttctgctgggaacaggaggacttgtccgggcttattccagggcggttcaggaaggtcttgcagccagccgtattattgagaagaaaaaaggaatctgtctcagagtaaccacggattatacaggagtgggaaagcttcagtatattgcaggcgagaggagcctgcctgttctgaacagcgaatatacagaccgggtaatcctggagcttctgattccgtttcaggatgtggatgaggtacagaaagccattacggaaagcacaaacggaagagcaaaaatggaaaaagacagagaaatgtattttgcagttctggatggggaagtgctgacctttgaggaatgacagcagcgctgtttctgactgtatgaatatcatctgacgggtaagaaaaaaaccagagaataactttttcagctattctctggttacaggctgtctgtcagccattcagtgaatcttttttcagtacgattttattacatactattcccgaaaactgaatcagcatttctccggttccggataatccacgccaaaggtttccacagttactgttttcattacctgatcgtcaaggggtctgtcactgtagtcggtatcctcttctgcaatgcggtttacaacatccataccctctgtgatcttgccgaaggcagcgtagcttccgtcaagatgaggagcagccttgtgcatgataaagaactgacttccgccggagtttggatgcatggctcttgccatggaaagaacaccgggagtgtgcgcaaggtcatttgcaacgccgttttgagcgaactcgcctttaatgctgtatcccgggccgcccatgccggttccgtccgggcagccgccctggatcatgaagccgttgatgacacggtggaagatcagaccgtcatagaatcctttttttacaagactgataaagttatttaccgtattgggagcaacctccggataaagctctgctttcattacatcaccgttttccatggtgattgttacaactggatttgccatagttttattctccttttgcgaaaagtattgtttttctctgtttgctctattataatatgcaaagaacaattctgcaagaaataagtaaaagaccggaactgctgaatcagtcaggtgataattgtttatccggcatgaaagccgccgggaacgaagtgatcagtagccggaatttgtttgggaaggcggagccatgataatagaaaacagaagtccggaggagacgtttgaattaggaaaaaaaatcggtgaagcagcaaagccgggacaggtatataccctgaacggagatctcggtgtgggaaaaactgtttttacccagggagtggcagcggggcttggcatcacagagcctgtcagcagccctacctttacgatcgtgcaggtatatgaggaaggccgtctgcctttttatcattttgatgtgtaccgtatcggagatattgaagaaatggaagaaatcggttatgacgattattttttcggagaggggatctgccttattgagtgggcggagctgatcggagatatccttccggaaaaacggattgaggttaccatagaaaaggatctgacacagggatttgattaccgcaggatcactgtacaggaggttgaataaaatatgaaaattttaggtttggacagttcagggatcgtagcttccgtagctgttgttgaagatgaggttctgatcgcagaatatacagtgaattataaaaaaacacattcccagacgctgcttcccatgctggatgaggtagtaaaaatgacagagcttgatctggatacggttgacgctattgctgttgccggcggtccgggctcttttaccgggcttcgtattggctctgctactgcaaaagggctggggcttgcccttaaaaagccgctgatcagtgtgcctacggtagaagctctggcttataatctttatgacacacaaggcctgatctgtccgatcatggatgccagaagaaatcaggtatatacaggaatttatcgttttaaagaccacagacttcagacagtggaggatcagatggcggttcccattgaggaccttcttgcaaagcttgaacagtatggggaaagagttacctttttgggggatggtgtgcctgtattcagaaaactgatccaggaaaagcttcaggcagctttcagctttgctccggctcatgtaaacagacagagggcggcagcagtggcttctctgggacttgtatactacgaagagggaagatgtgaaaccgcagaggagcatgttccggactaccttcgcgtttctcaggcggaaagagagcgggcagaacgggaaaaagtgaaaaatcaggaggctgcacaatgacatttcgtgaaatgcttgtggaagatctggatcaggttgtggatatcgaacagaaccttttttctgtaccgtggacaaaggaaggatttcttacctatctgatgaaaaaagacaccatgttttttgtggtggaagaaaaagaacgtattcttggctactgcagtataatgactgtgctggatgaaggagatatccttaatgtggcagtacgctcagaccgccagaaagagggaatcgggcagtttcttgtggacagcatgcttcgcatggcggaaatgcaggggataaagcttgtccatctggaggtccgccagggaaacgaaaccgccagacggctttatcagagacttggatttaaagaggacggacttcgcaggaattattatgagaatcctgtggaaaacgcagtgctgatgacaaaagagatgtagataactttgtcagaagaagaactgcggcagcaaaactgaacagaataccgatccgtttaccgggcgcatggaaagtaacaagaatttcatgcgtccctttttttatgggaaaacctacaaatcctttgtttaccataaccggatctgcagggcgtccgtctaccagaatctcatatccgttggaaaaggcaaaggaggttacaaagtatccgtcctccttcatggtaatactgccctggagaagcgccttttcgttttctgagcagggcgtaaatggcgtgatatcaggatgagcaatagcggaaatcggcaaagtgaatccgcggagattgtttattttataatttccctctgagaaagcaatctcgagagtttttaaaggtgtattggcagaaagcatataggtgaacgtgtgattctggttgggataaggggcggaggaaccggaaagcctgtttcggatgccgttaatggttatgtcaatatccctggttccctcatagtccacatcaaaagacagaagcagaatctgatctttcaggacagaagggaggctgcgggatacggtttctgccaggtattctgaggaacgtttcataaaatcctgtggaagagtatattcttttatctgagaagtatagtctgatttcccggtgccggcagtttccggaacaatggtccggttggtaagggtatccagattataagggtaatcaagcgtatcataatctgcttcactcataagagctgaggttccgtaagcaacgggcagtacattgggattttctgccagaaccatatttcccttttggaggcgggggacatatcctgcaggaagccggttttcagtggtctgtatatatcggatgcccatcagatattcctgaaacggattgggagcagcgttcatggaaacacggtttctggtgctgaccggcattttcagaatgtcataaaacagatggttgtaggcggtgttggaaacagaagaatacatggttgtacggcgttggttttccaaaggagcgtagttgctgtttgtcatgggggcagtaaaaatatctacagcgtttccgggttcggaacagacctccttcagttcctgacgggtaaagatttctctggattttacagaggaagcagcgaatttttctgttttggcagtgctgacaaataaaagagcaggtataatacagagaaagacgcagactatgtggttttttgcgggataagcctgtaaaagggaagaggatactcctgttttggaagagctgtttttttctctgaaatgaaattttttctttaaaacaatttctgatttcggcaacagtgaataaaaaagcagcacaagtatatctgccaggatcagcttccactgtggatgatgaagaaaaaatatttgaaccagtgcaggtatggcacaaaaggctgccggcagaaagcggtgtttcagctttttctgctgaagaagactgagagtacgggctgtaagcagcagaaacagtggaagaaagggaataagagctttggggcgaagataaagggttccgttcagaagccagcagcaaagctgactgaaacacaggataagaagcgcaaaggccagtttttttgttttgctgcagcccagagataacattacacagtaaaggaccagaagggtgagtccacagccgtaggagctgtaaagtaaagtattcatggagggatttactgtaaagatctgccacagagaagcgggctgtacgtcttttttattttccaggatcacaagcgctgtaggaagaaggtggacagctgcaagacaaagacctgtaataacagaaatcagccagattttccatgtgtgcaatctgtttttgcctgtacagagaagatacagggaacagcagacaaggcaggagggcagaaaataaaaactgtgaacagatatcataaaaaagcttacagcaagtccgggatgaagggggaatgtttttgcgtaaactccggtatgaatttcggacagcctgtctgtgtatataagggcaagaatcagaaacggaagatagtttacaaacatgatctgcctgtgagcctggaacatacagccggctgtgagataaagaaatcctccggtaagacaataaagcctgtccagggatttatgaaaaagccaccagtaaagaaggcaggcgccggcagccatttctgttaccgcataaaactgaattacagtttccacaggaacagaaggaagaagataactgaccagaacgtccgggcgcagaaatccgtagtaggaaagtgcataaaaatttgtcccgcttccaagagaaatccagtccggaaacagatctcctgttgcataaaactgtctgcgcatagtatccacaagcgttacatgctggcagtaccagtctgtttctgagccgaaaagctttccttccggaacggaaaaatacacaaatataagtactgccgcggtaagaaaaataaaatgcagtgcagtaacagggaaaaagacctgagtatttttccggggatgggagaaggaagtggacttccggttaataagatgttccataaaagcgggctcctttcaaatgaagtagagtatatgaaatgataacgaaaatatacattttatatcttaagaaacctgttgcataaatctgaagaattattaagaatcacattgaagcccgaaaaacatgatataatatgaacgcttaatgaagccgggacgaagatacagagtgagttcggagatagaatagttactgtttatacggtaatattctgcgaggcgttttgtcatatatatgcaaaattcctaatacccggtcacttaacgaggcgaatgatgcaaacatagagtttaaagatcgtagtataatattttgtggaaaaatgcggcagcagtatttcccaacgcaaaaggagaaagataatggaagaaccggaaattttgattgtggacgataaccctgaaatccgggaggtggctatggtacttctgcagggggaaggatttactgtgggtgaagcaggagacggaaaggaagctctggataaaatagaacatggagcttatgatctgattctgctggatgtgatgatgccgggattaaatgggtatcagacctgtatggagatccggaaaaaatcaaatgtcccaatcctgtttctcagcgcaagaactcaggtggaagataagatcatgggattttccagcggcggagacgactatcttcccaagccgttttcctatcaggagctgatcagcagagtaaaagccctggtgcggcgatatcatgtatatcagggcagcggccggaggacacaggaagaaaaaatgtgcagcggagctttggaagtgtatccggaagccggaactgtatggaaaaacggaaaagagatttctctgacagatacggagttttccattctctgtacccttatgaagcacagaaagcagattttttctgtggaacacctgtatgaggcggtatgggaagaaacttattattacggggcggcaaatattgttatggtacacatccggaatctgagatcaaaaatagaagatgatcccggaaagccaagaattatccgtaccatatggggaaggggataccgttgtgattaagaaaaaaagaaatgaaagagagcggaagctgacacaggagcttatgctgctttttctgacaagctttacagttgctgttctggctaccatgttttttgtaagcagaagatttgcagcttacggctgggttctggaacatgaaatattcacagattcccgggaagaatatatggactggcttaaagagacggcgccctcctacagaatggatcagccggagatttatatgccggtatttgaagaaaaggcagatatttatacatggcttggaatttatgatgaggacggacaatatcaggaaggcctttttccagaagtcttagacagtcctttctggggcagctgggtatggtcagacagtgatatagccgcccaggggatggagacgcctgtagaaacagaaattgaatttcaggatggaactgcccgggtacagattatgagttaccagtctcttaaatttttttcgttatattatctgatggttgcagctgcagatggaatggcagttttttttccgctgcttatttttgctcacagaagaatgaaatatctgggaaacctgcgtgctgagattacagtgatcgggcagggggacatggagcacagagtaacagtaaaggggcatgatgaaatttccgccctggctgcagaactggataacatgagactgacgctgaaaaacagtatggaaaatgagcggaaagttcacagggacaatcaggagctgatcagggcagtttctcatgatctcagaacgcctctgactgcccttaacggatatctggagattctccacagaaaaaaaggaagggcagaagattaccctgcttatattcagaaatgcctggaaaaaacagaagagattaggaacctatcagataaaatgtttgagtatgctcttgtatttgagaatacaggagaaactatcatgcagacctggaacccgtcaatgtttgcagaaatggtaaaggaaatggcagaagaactgtctgttcaggggattccggtttcttttagccagggggaactgccggaagccgtatggaaagcaaatccctttctgatcagacgtctgatctggaatcttggttccaatattgagcgttatggggacagaaccagaacaacggatattcaggtgtatgtagaaggaaagatgctgaaaacagtaatgtccaacggtatgggaaaagagaagcaggcggtaggaagcgggatcggactgaaaagcgctgcaaagattgcagagcttcacggaggaagtcttttatgtgggaaaaccggagaggagtttgttgcagaactcagccttccactgcgatgacactgtgacagaaggggatttttgccttgttttgaggttctgattgtgttacactttgccagtagagaaaatgtgaagataacagcagaaggtattttgcagaagtcttttcagaataaaagaggtaaactatgttagatgtttgtttagtaggaaccggagggatgatgcctcttccgagaagatggctgactgctctgatgaccaggtacaatggaagcagtctgctgatcgattgcggagaaggaactcaggttgctgtaaaagaaaaaggatggagttttaagccgattgatgtaatctgctttacccattatcatggagatcacatcagcggactgcccggactgcttcttaccatgggaaatgcagaccgtacagagcctctgacgctgatcggccccagaggcctggagagggtagtgaacgctcttcgggtgatcgctccggagctgccctttgagatcagatttatagaaattacgaaaccggaagaggttattgagctgaacgggtatcgaattactgctttcagagtgaatcataatgtcatctgttacggatatactctggaaattttaagacagggcaaattttctcctgaacgtgccaaagagcaggagattccgctgaaattctggaatccgctgcaaaagggccagactatagaggaaaatggagttgtatatactccggatatggttcttggaccggatcgaaaggggatcaaacttacgtataccacagataccagaccaacggaatccattctccgcaatgccagagagtcagatctttttatctgtgagggaatgtacggagaggatgacaaggcggataaggcaaaaggctacaagcatatgactttccgcgaagcggcggagctggcgcgggatgcccgggtaaaagaaatgtggctgacacattacagtccgtccctgatccgtccggaagagtatatggaaacggtaagaggaatttttccgcaggcttatccggggaaggatggaaaaagtgcggaactgaattttgaggaggaataaaagtggaagatacactgatcctggcaatagaaagctcctgtgatgagacagcagcatctgttgtaaaaaacggaagaacaattttatctaatgtgatttcctctcagattgaactccataagctgtatggcggagttgtgccggaaattgcatcacgcaaacatattgaaaaaatcaatcaggtaatcgaggaagcgttaaaggaagcgggggtaacgctggacgacctggacgctgttggcgttacctatggtccggggcttgtaggcgcgctgcttgtaggggttgcagaagccaaggccattgcctatgcgaaaaaacttcctcttgtaggcgttcaccatatagaggggcacgtttccgcaaactatattgaacatccggatctggaaccgccgtttctttgcctgatcgtttcaggaggacatacccatcttgtgatcgttaaagattacggggagtttgagattctgggaagaaccagagatgacgcggcaggagaagcctttgataaagttgcccgggctattggtctgggctatccgggaggaccgaaaattgacaagctgtcaaaagaaggaaatccggatgcgatacagttcccgagagcgaaagtaggagactgtccgcatgatttcagcttcagcggagtgaagtctgcggttctgaattatctgaatcaggctcagatgaagggcgaagaggtaaatcgtgcagatctggcggcatctttccagaaagcagtggtagatgttctggtagagcatactatgatggcggcaaaagattatggaatggataaagtggcaattgcaggaggtgtggcttccaatggtactctgagggccgctatggaaaaagcctgtgaagaaaatggctatcagtttttccgcccgtctccgattttctgtacggataatgctgccatgatcggagcagcagcctattatgagtacaaaaagggaactcgccatggctgggatctgaatgcagtgcccaatctgaaactgggagaaagataaaaacttttggggaggtttttatggaaagaaaaaatacagccattgttttggcggcaggacagggtaaacggatgaacagcaaggtccagaagcagtttctggagctgggaggaaaaccattgctttattattctctgaaatgtttccaggacagtggaatgatacgtgatattattctggttacaggggcggagtcggttcctttttgcaaagaggaaattgtggaaaaatatggtctcaccaaggtgacaaaagtgatacccggtggaaaagagcggtatgattctgtttatgaaggacttctttcctgtgaaaacagtgattttgttctgatccatgatggggcaagaccttttattacagaagaaattattcggagaggaatacagggagttgagaaaacaggtgcctgcgtgatcggtatgccttccaaagatacggtgaaaatagcagatacacagggatatgttgcagagacaccggaacgaagctctgtctggacgattcagacaccccagatctttgagtataatcttatccgagaggctcatgagaagattcgttgtcgggatatgtctgcgataactgatgatgctatggtggtagaacaggaaacgggtgtgaaaattgtccttgtagaaggctcgtataagaatcttaagatcacaactccagaggatctggatatagctgaaatttttttgaaagcattggataaattggcagatatttgaacccaaaagaatattttatagtgtttttgcagactgaaattaagaattattaagaagattataaggctttaattaagaatttgcttgtacgatataactgtattcaggaactgcagaactgaaaataaaatattatttacatggaggatgtgttgttatgggcaaaaaaacttatgaaactgggcataacaatgttgtctatggctatgccagtcgttcctgcatatggtgtgtcagctgccgcaaataccgagggagtggctttgaaaggaaaatatgaagaaaagtattttgcatacacttgctgcatatataatatatagagtgtcttttgatttttcgctttttgcttacagcgttgatttaccaggcagtctgcaacgtttattggcggtgtcattggctattgcgtgtatattggggttaatttacttatatacaaaatatctcatgaaatcctcggtacaggaaataaatcttggaaagccgttgcctgatcccaaatggtgtatgattggaataatacttccttgtacaataagtcttttttatattttatttatacctggaaaatttagatgggagaatcttccgcttcagacagtgtttgacaccattctgctttcagtgttttgcgacggagtaagagcgggtataatggaggaagtaacttttcgcggattgatgttgggttctcttgaaaaggaattgggaagaaataaagcaattatgatttcttcatttctctttgcgagtatacatttcgactcggtggagatacagagcctttcagatggcatccttgttttgggagcgttgatgcttgcagggacagggctggctttgattacctgtcaaacgggttctatttggtcttctgtggtggtacatatgctttttaacctattgtctggagattcacagattatccatatagatgtagagcagatctttccggcgttatggacgtatacggttgacagtcaaagcaatttactggtaggcatcccaggttccagaacgatagattatggtattccggccattattggatttgttgtgttaatttttatagctttattttatatgcgtaaggataatggggaacaatgcaactatgaatgaagaaacaattttgataatagaagatgatggctcaattcgtgaaggtgtaaggattctcatggaagcagaaggatatcatgtggaggaagcggaaaatggttatgcagggataaaaattgtaaaagatacagagagggtggtggatctgatccttttggatattatgatgcccggactatctggaataaaaacctgccaggaaattcgaaaaatatcaaatgctccttttttatttttgacagcaaaagatcaagaatccgataaattaatgggattaatggctggaggagacgattatcttgtaaagccgttttcgtacgcagaacttcttggaagggtgaaagctctgctgagaagatacaaggtttataatcgtgcacagcttgaaaagaaaaatctcaaatgggtgatatccgaaaaactcagattatgtactgagtttaatgaagtatggataggggatgaagaaatcaatcttacagaaatcgaatataagattttgtgtctgatgatacaaaatccacagaagattttttctattcaaaatctttatgaaagtctgtggggagagccttttgtttatacctcagcaaatacagtaatggtgcatatccgaaagcttcgtataaaaatagaagcagatccgcaaaagccacagatcatccagaccgtgtggggaaagggatatcgttttgggcgtattgttgaaaagaaagcaaaatgacagtatgaagaggaaaatgttaaaaaggcttgttcgaagttttttggcaggcctttttgtatttctttaacttgatattggcggaagagaatggatggatcgatttttctgggaatcaaattttttgggagagagtaaaattctggaagaacttcaaattcatgtagaaaaacatcatatcaaagctacagatgctataagtctaaaaaagtgggcatatgacaatcgtataatagaatttgttgttgtaagagaaggacgccttttgtttgatcttaagatacaggagggaattgtagaagatggaattcagctcttgactaactgggaaaaaggctatacaaatgtgattaaatttgcagacggaaatgcaaatgtgcagctttatgatggaagaaatgaaaggtatcatgatattcttctgggaatttcactatttaccggattagtattgggccttacagttcttatgtcgggtattcgtgaagatgtggattatatctgttacctggaaagagaagtagaaaaaaattgggcagggaaatttatctgcaaacataatggtgcaggggcaggatgaactggcaaaactggctcagggtttagatataatgagaaaaatgctggtttacagagaagaaaaggagcatgaaatgcgtgcggcacaggataaactggtgcttggcatggcacatgatcttcgtactccgctgacaggtcttatgacttatgttgaaatattaagaaagcaggaaaacgaggggaaagtcagtcgggagtatatagataaagcgtttgataagatttttcagattagagcgctttcagaccaaatgtttgaatatttttttgtgttttcaaaagaaaaaatagatttggaatctgcagaggaagtggagagtgcatttggggactacatgtcagaactattggcattattagactacgttggtttttcggttaatgccaagaaaatcgtctggagaccgattctggtacagattaacagaaattatatggggaggattataaacaatcttgtttctaatataaggaaatatggtgatatgaaacaggaagtgtatctggaattcttttatttatcagataaggtgggaatttctattacgaatgggattgctctttcagatagtcatataaatggaacgggaatcggattaaaaaatgtatctcaaatgatgtaccagatgaatgggtgcgtagaaattcctgaaatggagaaagtgtttcgtgttattttgtggttccctgtaatcaaagattttgatttaatgtgaaatgcatgatagctgaaaaaattgctgaaaaaattgaaaaatatttgaatttatgtcttgacaggaatgatgtttgatgatagaatgtaattcgcgtcaacgagaaaaaggttggaaaacgcagaattgcataaggagagatatcgaagtggtcataacgaggcggtcttgaaaaccgtttgtccgcaagggcgcgtgggttcgaatcccactctctccgttcgtcaggtaaataaaaacttgcaaaaaaaagttaaaataatgcttgacaaaacaaagaaagatgttatataatgaataacgcttctgacaaacagaagagaaacatctagggcaatttggagaagtacccaagctggccgaaggggctcccctggaaagggagtaggtcgttaacagcggcgcgagggttcaaatccctccttctccgtttgagttttacgacttggaaaaagtcgaaaaaacttgaaaaaagttcttgacaagctcgaatatatatggtaaaattaatgagctgtcaaaacggcaaggaccttgataactaaacagtgagacacatacgattctcgaaaattcttttatacattcaaagaacggttcgatgaaccaataacagtaaaacgagagatagctagtagttatcttgagtggaacaacctcttgagcctttggctcaatcggtgagatgcaattaagccaatgcaagcattgctgaattgcttacacacttttacagagagtttgatcctggctcaggatgaacgctggcggcgtgcttaacacatgcaagtcgaacggggattattttgacagagacttcggttgaagtcgttataatcctagtggcggacgggtgagtaacgcgtgggtaacctgcctcacactgggggataacagtcagaaatgactgctaataccgcataagcgcacgggattgcatgatccagtgtgaaaaactccggtggtgtgagatggacccgcgttggattagccagttggcagggtaacggcctaccaaagcgacgatccatagccggcctgagagggtggacggccacattgggactgagacacggcccagactcctacgggaggcagcagtggggaatattgcacaatgggggaaaccctgatgcagcgacgccgcgtgaaggaagaagtatctcggtatgtaaacttctatcagcagggaagaaaatgacggtacctgactaagaagccccggctaactacgtgccagcagccgcggtaatacgtagggggcaagcgttatccggatttactgggtgtaaagggagcgtagacggagcagcaagtctgatgtgaaaggcgggggctcaacccccggactgcattggaaactgttgatcttgagtaccggagaggtaagcggaattcctagtgtagcggtgaaatgcgtagatattaggaggaacaccagtggcgaaggcggcttactggacggtaactgacgttgaggctcgaaagcgtggggagcaaacaggattagataccctggtagtccacgccgtaaacgatgaatactaggtgtcgggtggcagagccattcggtgccgcagcaaacgcagtaagtattccacctggggagtacgttcgcaagaatgaaactcaaaggaattgacggggacccgcacaagcggtggagcatgtggtttaattcgaagcaacgcgaagaaccttaccaagtcttgacatcccgatgaccggcacgtaacggtgccttctcttcggagcatcggagacaggtggtgcatggttgtcgtcagctcgtgtcgtgagatgttgggttaagtcccgcaacgagcgcaacccctatccttagtagccagcggtttggccgggcactctgaggagactgccagggataacctggaggaaggcggggatgacgtcaaatcatcatgccccttatgatttgggctacacacgtgctacaatggcgtaaacaaagggaagcgagagtgtgagcttaagcaaatcccaaaaataacgtcccagttcggactgcagtctgcaactcgactgcacgaagctggaatcgctagtaatcgcggatcagaatgccgcggtgaatacgttcccgggtcttgtacacaccgcccgtcacaccatgggagtcagtaacgcccgaagtcagtgaccgaaccgaaaggacggagctgccgaaggcgggacggatgactggggtgaagtcgtaacaaggtagccgtatcggaaggtgcggctggatcacctcctttctaaggaagaagaagtagagagatgtgtttcactgtctaggtattaaggtgtgtaagtgaacctcggaacaagagttccttggtcgcgactgcgtcgcatatacaaccctgataaaaagtctttatggaagcaagcttccaacagcctttttctctggattgtgcacttactttagtatcacgaaatttctggtgtcgatgcgcttaggggacacacccgttcccatcccgaacacgacggttaagacctaagcggccgatggtactgcattggagacgatgtgggagagcaggtggacgccagatcaaatggggatgtagctcagttgggagagcacctgccttgcaagcagggggtcgagagttcgaatctcttcatctccattcaaaagcttttagcttttgaaagatgggcttatagctcagctggttagagcgcacgcctgataagcgtgaggtcggtggttcgagtccacttaagcccattgggtcttaagtaattaagcccaggatattgtaccttgaaaactgcatacatgtaactttgtgtattgattgtaagtgaacctcggaacaagagttccttggtcgcgactgcgtcgcatatacaatctgcatgataagcatttatggaagcaagcttccaacatacttatcctttgattgtgcacttacttaagttacacgaagatccttgatacaaacgtaaaacgtaagataggaagacatcgataaatttatttatcagcaatgagaatcaaagaccgcatcacctacgctagggtgatgaaaagcgaaaggtcaagcagaaagggcacagggcggatgccttggcactaagggccgaagaaagacgtgataagctgcgataagcttcggggaggagcaaatatccattgatccggagatctctgaatggggaaacccacatgaggaaacctcatgtatccatacgccaatccataacgtatggaggggaacccggggaactgaaacatctaagtacccggaggaaaagaaagaaaactcgattccgtaagtagcggcgagcgaacgcggaggagcctaaaccagtgtgcgtgcacgctggggttacggactgcatttaagattctgtaaagctagcagaacggttttgggaaagccggccggagagggtgagagccccgtacgcgaaagcagagcagactgagcaggatccagagtaccgcgggacacgagaaaccctgcgggaagtgagggggaccaccccctaaggctaaataccacttagtgaccgatagcgcatagtactgtgaaggaaaggtgaaaaggaccccgggaggggagtgaaagagaacctgaaaccctgtgtctacaagctgtggaagtgctttatatgcacgaccgcgtactttttgtagaacggtccggcgagttgcgcttactggcaaggttaaggtcttaaggaccggagccgtagggaaaccaagtcttaagagggccagagtcagtgagggcagacccgaaaccgggtgatctatccatgtccaggttgaagctgccgtaagaggcagtggaggaccgaacccacatccgttgaaaagggtggggatgaggtgtggataggggagaaattccaatcgaacccggagatagctggttctcctcgaaatagctttagggctagcctcggtagagattggcggaggtagagcactgaatttcctagggggcgtcaaagcctaccgaagaatatcaaactccgaatgccgcagaattgcttaccgggagtcagactgcacgagataagttgggcagtcgaaagggaaagagcccagaccttcagttaaggtcccaaagtgcgcgttaagtggaaaaggatgtgggatttcaaagacaaccaggatgttggctcagaagcagccatccattcaaagagtgcgtaatagctcactggtcgagaggtcctgcgccgaaaatgtccggggctgaaacgcgccaccgaaactaaggaatcagaaatgattggtagaggagcattgcatgcgggacgaagcagtaccgtaaggagctgtggactgcatggaagagagaatgccggaatgagtagcgagaataaggtgagaatccttatggccgaatatccaaggtttccagggtaaagctgatctgccctgggtaagtcggggcctaaggcgaggacgagagtcgtagccgatggacaacaggtggagattcctgtactgcggtataacagaactgtggggacacgtgcagaaagcgggagccgggaatggaaagcccggtgcaagtgaggtaccagacacactggcaaatccgtgtgtcaatgggaagacacgacgcggaccgaaagaaagtagggaagcccgtgagctgtgcgtcaagaaaagccgctatagtttataccgtacccgtaccgtaaaccgacacaggtggatgaggagagaatcctaaggccggcggaagaagcattgtcaaggaactcggcaaaatgaccccgtaacttcgggagaaggggtgccagggagacctggccgcagagaataggctcaagcaactgtttagcaaaaacacaggtctatgcgaaaccgaaaggtgaggtatatgggctgacgcctgcccggtgctggaaggttaagaggagaggttagcgcaagcgaagctttgaatttaagccccagtaaacggcggccgtaactataacggtcctaaggtagcgaaattccttgtcgggtaagttccgacccgcacgaaaggcgtaatgatttgagcgctgtctcgacaatgcatccggtgaaattgaagtaccagtgaagatgctggttacctgcgccaggacggaaagaccccatggagctttactccagtttggtactgggatccggtgctgcatgtacaggataggtgggagactgagaacacaaaacgccagttgtgtgggagtcgctgttgggataccacccttgcagtattgggtttctaaccatccgccgtgacccggcggtgggacaatgccaggcggggagtttgactggggcggtcgcctccgaaagggtatcggaggcgcccaaaggttccctcagaatggacggaaaccattcgcagagtgcaaaggcagaagggagcttgactgcgacaccgacgggtggagcaggtacgaaagtagggcttagtgatccggtggtattaagtgggaatgccatcgctcaacggataaaagctaccctggggataacaggcttatcactcccaagagttcacatcgacggagtggtttggcacctcgatgtcggctcatcgcatcctggggctgtagtaggtcccaagggttgggctgttcgcccattaaagcggtacgcgagctgggttcagaacgtcgtgagacagttcggtccctatccggcgtgggcgtaggatatctgagaggagctgtccttagtacgagaggaccgggatggacgggccgctggtgtaccggttagactgccaagtctacggccgggtagccaagcctggaagggataaacgctgaaggcatctaagcgtgaagcccccctcaagatgagatatcccattcgaaagaagtaagaccccttgaagacgacgaggtagatagggcagaggtggaagtgcggtaacgtatggagctgactgctactaatcggtcgagggcttgaccaaaaagctgagacgagcgagacggacaggaagggaacagagcggagtgagtttactcacagagggatgttcacagactggacggagcatttgcgaagcaaatgacattgagtggcggaagtcacgagatgaccgggcgagtcgtagaaagcgaaagcaaggtcaaaaatgattctaatgtcaacatgtatgtagttttgaaagtgcaatactttctattcctccttagctcagtcggtagagcatgcggctgttaaccgcagtgtcgttggttcgagtccaacagggggagtttgggcatgaagcctaacctaaaataagaattggctccatggtcaagcggttaagacaccgccctttcacggcggtaacaggggttcaaatccccttggagtcattttcctttaaggaaatgcatacaatattatatctggtgccatagccaagtggtaaggcaaaggtctgcaacacctctatccccggttcaaatccgggtggcacctctctaaagagccttgatttcaggctctttttttcatatatatattcatttttacaaagattctgcggagagtgatccggcattttacaaaggttctggatgtcgcgctctccgcaaaatattgactgtgttatatgggattagtcaggtatcagtcctgatagacaatttctcctctacagatagtgtaatgaatttttccatataattccatacctttaaatggtgtattggaggatttagacaggaaagaatccacagtccatgtttcatctggattaaaaattaccagatcggcaggagctccctcctcaacagaaccaccgggcagatgataaagatcagcaggattacaggtcattttttccagaagctcttccagcgtcaggcagcctttttttaccagattggtgataccaaggccaagagatgtttctaatcctgtaatgccgcttggagcatctgtgagggctttggatttttcttcagcactgtgaggggcgtggtcagtggcaatcagatcaatggttccgtctttcaggcctgcaatgatcgcctgccggtctttttctgtacgcagaggcggattcatttttgcaagagtaccataagtaagaactgcctcatcggtaagagtaaaatgatgaggggtggcttccgcatggatatccgcgccaagttcttttgcaagacgcacaagagcgacagaattgccggagctgatatgctggatcacaacaggagccttagtatgaagggcaagcatacagtcccgggcaaccatgacttcttcggcaattgcaggagaacctgtaatcccaagcctgtctgctacaggaccggcattgattccgttatttgcgataaagcttttatcctcttcgtgaaggctgataggcatatttaattcggctgcgttttccatggcccggctgcagaattccgcatcaagaagagggatgccgtcatctgtaaaaccgcaggcaccggcttcctttaaggctttaaaatcattcatgatttctcccttaagcccttgggatacagaagctgtctgataaatgttaattttttctttttttgcccgtgtcagaatatctgtaagggtttcaacagaatctacagcaggttttgtatttgccatgcagattacagaggttacgccgcccctggcagcggcaagagcacctgtgtggagatcttccttataggtaagtcctggatcacgaaaatgaatatgagtgtcaacaaggcccggcgcaacagtcagaccggtaagatccagaacttcttcactattttcaggaacaagaccagcagaaatctgagaaatctttccgtttagaatacggatatctgtaagttcctgagtatgcgttttgggatttataagaaaaccattttttaaaagcatataataatcctccttttaacgggcatatcagcagtaaacagcccttgttatttagattcagtatagaagaaagaaaggaaatttgtcaagggaagagagaaaaggagtagtatctgttttcaggcaaaaataaataggtgattcgacaaaaagttctttacaacagggaaaccatatgatagaataaacaactgtgatatattttcatatccttgctctctgacagtacagagggccataaagaccacaaggaggtaaaaagcatgaacaagtacgagttagcattagttgtgagcgctaaagttgaagacgaagtacgtgatgcagtagtagagaaagcaaaaggctacattacacgttacaacggcgtgatcacagaagtagaagaatggggtaagaagaaattagcttacgaaattcagaaaatgcatgaaggcttctactatttcattcagtttgaagcagatgcagagtgtccggcggaagtagaaagacatgtacgcatcatggacaacgtattaagatacttagtcgttcgtaaagacgcataatctttttacacatggattttagaaagcaccattagaacccgttcacttactgaaagaaagaggtagaaaaatgaacaaagtaattttaatgggtcgcttaacaagagatcctgaggtcagatattccgcaggagaaaatgctctggcaatcgccagatatacactggcagtagacagacggttccgcagagatggagaggcatccgctgattttatcagctgtgtggtattcggacgcggagcagagtttgcagaaaaatattttcatcagggaatccgtattgtagtcagcggacgcattcagaccggaagctatacaaacagagaaggtcagaaggtgtatactacagaggtggtagttgaggaacaggaatttgctgagagcaaagccgcaagtgataactatgtagcatctcatcctcagcagagcgttgctccgtcagcgccgtccatgccaagcccaagcgctgcaagtgcagacggcttcatgaatatcccggatggaattgacgaagaattgccgttcaattaaagcctgagcattaaatgaacgacgaagagaagagagaaagctggttgtatccaggtgagagatcaggatttctcagtcaatcaaattgaaagaaaaacaggaggaaaccatcatggcttacaatagaggcgaaagaccggactctcctatgaaaagaagaggcggacgcagaagaaaaaaagtttgtgtattctgcggtaaagaaaacaatgagatcgattacaaggatgtagcaaaactcagaaaatatgtttctgagagaggtaaaatccttccgagaagaattacaggaaactgtgcaaaacatcagagagctctgacagttgctattaagagagcacgtcatctttccctgatgccatacgttcaggactaattgaacctgataccgctgccgatcaaatggcagcggtttttttatctcattatttatatggaaaaaatccctgaaatctgttataatatgttttgttgagtgaaaggaaacatgtaaatttttcaaaaaagaatggtaatgaagattatggatggtaaattcaaattaaaaggtcatctgaaacatctgacaagatggcccctgtatctgaccgctcttctgattatcctgaacatagtggtttatgcgatagatataaaagccggagtggttgttacactgggagcgctgatctatctggcctgcgctgtaggtattttctgttaccacagacctcagatgtttaacgatcttgtggcctttgcaagtcagtatgaattccttgaaaagagagttctggaagagcttgctctgccatatgcgatcatggatatgcaggggagaatgatctggtgcaacaaggtatttgcgcagcttacaggaaaagatcagttctacagaaaaaatattaatacgatttttccggatattacgccggacaagcttccggttccggaagaaaaagagatatccgagatcagtacacaggttggtgactgtatatacaggatttccatgcagcgcgtcctgttaggcgaggcaatggttcattcagaagttctggagggactttccgagaatacaagcctgattgccatgtatctgtatgatgagacagaactgaaagattatattaaagcaaacgaggacaacaagcttgtagttgctctggcatatctggataattacgaagaagcacttgagagtgtggaagatgtaaggcgttctcttctgattgctttaattgacagaaagatcacaaagtatttttcaaattatgatggcctagtgcgtaagcttgaaaaggacaaatatttcctgattatgcgtcagagttctctggaagctctaaaagagcagaaatttcatattctggaggaagttaagactgtcaatataggaaatgaaatgacagtcaccctcagtattggaatcggtcttaatgcagctacgtatcttcagaattatgagtactgccggattgccattgaaatggctctgggtcggggcggcgatcaggtagtcatcaaaaacggagacagcatcacctattatggcggaaaagctcagcagatggaaaagacaacccgtgtcaaagcccgtgtaaaggcgcaggcgctgaaggagtttatgagtaccaaggaacgagtggtcgttatgggtcataagatcactgatgtggatgcgctgggagctgccattggtatttaccgtgcgggaaaaactctgggcaaaccggtgcacattgtagtaaatgatccgtctacttctatcagacctctgatggcaggttacctgaataatccggattatgagccttctatgttcattgacaaaaatcaggctatggagcttgtggataataatacggtagtggtagtggtggataccaacaagcccagctatacagaatgtcaggagcttctgtatatgacaaaaacaattgttgtgctggatcaccaccgcagaggcaatgaaatcattcagaatgcagtgctttcctatgtggaaccctatgcttcctctacctgtgaaatggtggcagagatccttcagtatttttctgatgatctgagactgagaaatatagaggcagactgtatttatgcgggaattatgatcgacaccaataattttattaccagagctggcgtgcggactttcgaagcggcagcctttctgagaagaagcggcgcagatatgacaagagtgcgcaagcttctcagagataatattgattcatataaggcacgggcagaggcagttcgtaccgcaagtatttataaagactgctttgccattgccaagtgtcctagcgagggcctggaaagtcctacagtagtgggcgctcaggcggcaaacgagcttttgaatattgccggtgtaaaagcatcttttgtgctgacgccgtataataatgaggtgtatatcagcgccagagccattgatgaagtgaatgtacaggtgctgatggaaaaaatgggcggcggaggtcatctgaatattgcaggcgcacaggtgaagaaaccaatgcctgaggttgaagagatgctgaagaacattattgacgaaatgtatcaggaggaaaaggaaacaaaatgaaagtaattttattagaagatgtaaaatctcttggaaaaaaaggtcagattgtaaatgtcagtgacggctatgccagaaatatgattctgccaaagaaactgggcgttgaggcaacaccgaaaaatctcaatgacctgaagcttcagaaggcaaatgaagaaaaagtagcacaggaaaatctggaggctgctcaggcatttgcaaaggatctggaaacaaaagaagtaattcttacgctgaaagtaggagaaggcggaagaacctttggttctgtttcagcaaaagaaatttccgaggctgcaaagtctcagctgaatctggacattgataaaaagaaacttcagcttgacggtccgatccgcaatctgggtgtgactcaggtcggtgtgaaactgcatccgaaggtaaccggaagtcttaaggtctggatcaaagaagcataaaacggaggagcccgcagtatggaagaagcactggtcaggagaatacttccccacagcattgaagcagaacagtctgtgatcggctccatgctcatggacagggatgcgatccttgttgcgtctgaaattcttacaagcgatgatttttatcagaatcagtacggtattatttttgacgctatggtagagctgtgcaatgaaggacagccggttgatctgattactcttcagaacagactgaaagaaaaggaccttcctccggatatcagcagtatggaatatgtcagagagcttctggaagcagttcctacttctgcaaatataaaatattatgcaaatattgtaagtgaaaaagctcttcttcgtcgtctcattaagactacggaggaggtggcgaacagctgttatctggaaaaggaaaatacagaaacccttctggaagaggcagaaaaaaaacttttcagtattttacagagaagtattggcggcgattatgtaccgattcagcaggtggttctgaatgccattaataatattgaaaaagcttccaagctgaagggaagcgttaccggaattcctacaggctttgttgacctggattacaaaacttcgggtatgcatccttcagatcttgtcctgatcgcggcccgaccctctatgggaaagaccgcttttgtactgaatatcgcgcagtatatggcatttcgtaaaaatgttactgtggcgatcttcagtctggaaatgtcaaaggagcagcttgtaaaccgactgctggcaatggagtcccatgtggattcccagaacatgagaaccggtaatctgaaagacgaggactggacaaagctggtagagggcgcggatattattggccgttccaatctgatcattgacgatacgccgggtatcagcattgcggaaatgcgatccaaatgcaggaagtacaagctggagcacaatctcggaattatcatgatcgactatctgcagctgatgagcggaagtggaaaaagcgattccagacagcaggaaatttcagatatttcccgttctctgaaagctcttgcccgtgagcttggtgttcctgttattgcactgtcacagttaagccgtgcggtagagcagagacctgatcacaggccaatgctttctgaccttcgagaatccggagctattgagcaggatgcggacgtagtaatgtttttgtacagagatgattattatcacaaggatacagaaaaaaaggatattgccgaggtcattattgccaaacagcgtaacggccccattggaaccattgagctggtatggctgccaaggtatacacagtttgtaaatatgaaaaaataaagtcgtacaaaaagaatcttccgtattggacacctgtcgggtgaaatatgggagatttttttgcttatcgggaaagtagtaactctgcagcggcattcccggtaaataaaaaaccattcgctttgctccggatataactgcttgaagataatactttgcaatacagctgatacaattttatgaaattcccatacatacaggagcaaatgcgttacagaatacaattaaaaactataaatgatcaaatatcaaattttacatactaaaattcggaatatgtggacataaaagaaaggttaaactctatgtgggcgtttcgcaaagacaaatcagcgaggagagtatgcacttttttacatctgcttatttatagtttaaatcaaaacttttaataagccgtaaaaagactggataataactacggattattttacagcaaaaattgtcgaacggtttttgttgaaatactcatatactctgctataatttgagatgtaggaggtgcggtatggagacaagatatacggtcagacaggcatcagaaatgacgggggtgaagccatatgttatgcgttactgggaggacgagcttgaccttcatatccagagaaatgaacttggccaccgctactacaccagatatgatattcaactttttctgaatatcagagaactgaagaaaagaggtttgcagcttcgggcgattaaggatctgatccctcagattgcccgcacggctccgggctcttctgacagtaagatacgccttttggaagaagcggtatctgtaaatgaggtgccggtaaaggaagctgtatattctgtggaggtcggtgcggcagaagaaaccgtaaatcctaaaatcctggaattccagacaatcctggaaagactgatcacacaggagatacagtcccaaaatgaagatgaggagagatatcgttctcttgatcttgcaatcagaagacagcagcttgccagacgcgaagccgctgccgcttcagtggataaaaaatcagggagaatcctgaaaatacataagaatatataaaacaaaaaagagccgcagcgtttgctgcagctcttcttttctttttctgtatgtagtccgttggattattctcctggctggatagcctctgtaggacaaacatctgcacatgttccgcagtcaacgcaagcgtctgcatcgatctcgaaatgatctgcgccttcagaaattgcctcagatgggcactcagcagcacaggatccgcagcttacacattcgtctgtaattacgtatgccattatagtatcctccttttttctcattagtaccccgaaaggttctataatgctattctaatatatcttatagaggattacaagtataaaattataaacatatttttataattagcccgttgattctaggtgatttttatattataataaatgtgctataaacagcataacattgcaggaaatgatggattggttttctgcatattataaaaggaggtagcagaaatggcacaggtttccaaagaaacaacaattggtgagcttctcagaatagatcccaactgcgctgcaattcttatgagaatgggaatgcactgcatcggctgcccgtcttcacagatggagtctctggaagaggctgctatggttcatggattcgatgcagatatccttgttcagcagatcaatgattttcttgctcaataagagagatatacagaggagcagaatgaataataaaaggacattgcataaagagcaatgtccttttattatttgttaaagctgtacaagctgttgaagtgcatttgcagaaaccagttttccatgttctttcagatatgcttctcccgagactgtgaaagccttgctgcttccatattcagaaaggatattgcatactctgttaaaatcttcaggagaagtctcagactgatggagaacgagaagataagtttcattttcagtattccggtacagagtattctggcctgtaaagaatccgttcagtccatgagccgcagcaattacatcatccagccgggaaaaaacaaacagacggattacattaacagcgggagtttcctgttccggcttttcttctgcagattttttatcttctgcagagttctttttggacagtgtcttcagcttggactcacagagtttctgaaaaagatctatgatattatctgcaccgtcaagggaaaccggatctccctgcccctgatctttaaaaggtgtaaatttggagaagcgggtatccagttcttcaggatcctctactttggtgataatgaggataatactgtctgttgtgacaggaattgcctcgatcatcagaggaatattatcagcttcaaatccgaattccagctgagcctgctccatcatatcacgaaaaagtttttttgctctttcggaaccgtaagcaagttcgctgagacggatctgatgaagctccaggtcttcacgggtcagagtacagcgaatctggttttcgttaattttttctattttcataataatcacatcctattctttttatcctgtctgtttaccatgtgcatatgttattatactcatacatgcagatgatgtcatttttgaagagcaggacattgtcaatgattttattggtttacagcaaaaaaatgcatatcaacttagcatctattatataccacaaatatggagaatgtaaagaaattcaatttacctaaatataaaatatttgaaaacaaaatcgaaaattttttatattttgctgaaacctcttgcatatgattaaaaacaaggtataataaaaaacagaaaaatcattctggatgtaatggaagcgccggaacatcacagataacagcttacatattgactgatttcttttttcaaatgtattgttgccattttatagtcatgcagcattcccgctgcggcaatcatacaaattccacgtattttaaagataaggcttcttttatggacagagatttttcagaaacccacagggtgctttcaaaaatccgcgaaaggagggaagaagagaaaatatatcacacagtacaaaggaattttatgcaaaagcatgatgatatgcacagaagaacgggaattccccgtcaaaggcagtaaattcccctctcatgcctgaccaggcggagtattcccgaaatatgaaaaaaatataaaaagaatgattttataacgcaatcgcacaaaagtatgatataatgaaacagcctttttaacataagaggaagtttgtgaaacatatagttctgaactgaaaggaaaaagcaaatgaaaaagcaggtaaaaaaacaaatgaagaagcagtatatgccggcagttatcgtctgcgttctgattcttctgcttgctgcagcaggagttggaattcatgtggtcaaaaaatatattccgacaaaagagcgcatggatctgaacgaatattacggcaagactgcggagggagagtccgtgatcgtcctgggaacagagattatggaggagcgcgcagtaacatctgatgatcagacttatcttccgctggagtttgtatcaggccatttgaaccagagatattactgggacagttcaaatcagcagattctttatgcaacaccttctgagcttcagatgtatccggcatctcagaacggagatggagatgtgtggctgaaggatggaagtgtatttttaagtctgccttttgtacaaaaatatacagacatggacgtatatatgggagaaaatccttccagaatcattatacagaatcagtttaccggggtaaatgtagcaactgcaaaaaaagatacatatgtccgttatcgcggaggaatcaagtcaccggttctcacagaggtcaagaaaggcgatactctgaccttcatggaggaatatgaagaatgggtgcaggttgctacaatggatggatatatcggatttgtgaaaaagaaagatgtgtcttctccggaagcaaaggattttgagagagactttcagaaggaagagtatcagcacctggctatggaagaaccggtgaatctgtcctggcatcaggtgacgtcagaagagtctaatacatattttaccgatgcagtggcaaatgtaagcggagtaaatgttatttctcctacctggttctatttgcaggatacacagggcaatattgcagatatatcttctgctgactatgtaaaacaggcgcatgataaaggaatgaaggtatggggactgattgacaactttaccgcagacgtaagtacaacagatactttgtctcagctttcttcacgccagaatattatcagtcagcttatgagcgctgcggaaaaaacaggacttgatggaatcaatgtggattttgaaacgctcagtgaagatgcgggaccgcattttctgcaatttttaagagaattgtctattgagtgtcataagagaaatcttgtactgtctgtggataatccggtacctgaagattttaccagtcattatgacagagaagaacagggggaggttgtagattatgtgatcatcatgggatatgatgaacattatgtaggttcagaagaaccgggctctgtggcttctcttccctgggtagaaaaaggggttgtggatactctggcagaagtaccggcagaacggaccattctggcaatcccattttatacaagactctggaagacaaccggaggagctttgacaagcgaagcgattggaatggatcaggcacagaatgtaataaaagaaaataaggcagagactatatgggacggcagtgttgggcagaatactgcttcttatgaaaaagacggttccagttatgaaatatgggttgaggatgcacagtctattgcggaaaaggtaaaactcattccgaaatacaaacttgcaggcgtagcacagtggaaacttggatttgaaaacagcagtatctggaaggtgatcagtgaaaatctgaaataacggacatacataaaaaagcgtgggaaaattgttcccgacgcttttttttataaagagatggattataaaaaggtcataattggaaggaggccggtactttcgtaccggcgcgtatgaaaaagaaaaatatttgtatagaaagcactgagctttctacataccttactataaaacataaatgtgaagaaattgtgatatcaatttgaaaaaattatgaaaaacagtgttgcctctgacataatatttttcagatgattttgaaatattttctgtcacagttacggaacattttcatccaggcaaaatataattgtttttctgcttacagtaaagttaaaattttttccatgtatccttaaagaataaaagaagcagagggaagatttccagccgcccggcaagcatgtcgaaaatcataacacttttggacagataggagaaggaactgaaatttcccattggtcctgcaacttcaaggccgggtccaatattattcagggtagcggcaactgcggtaaagttggtaaccagatcaaaattatccagtgagacgatcaggatagaaccacagaagatcagcagataaacactgagaaaaatattggtagagcgcagcgtctcatgtgaaaccgccttattatccattttcagtttttttaccgcatttgggtgaaggtatagctgaaactcctttcgggctgccttacagagaagaacaacacgggaaaccttgatacctcctcctgtacttcctgcacaggcaccaacaaacataagcagaaccagaatcgtttttgacagcgcaggccactggttgaaatctgtactggaataaccggtggttgtaataatagaaccaacctggaatgctgactgctggaatgcttctgcaaatccgctgaacatgtggcgggtattcactgcgatcagaattacggaagcaaggatgattccaaaataataccgcacttcttcaagcttaaacgcctgcttaaatttctttgtgaggatcagatagtaggcagaaaaattcacaccaaataaaataataaaaacagttgttaccacctgacaataagtgctgtagcttgccatactgtcatttttgattccaaagcctccggttccggcagaaccgaaagtaatacagagagaatcaaatacaggtacgccgccaagcagcaaaaggatgatctgcaggacagtcatgcccagataaatcgtgtaaagtatttttgcagtggactgtacttttgggacaagcttgctgacagaaggtccggggctttctgctctcattaggttcatatgatatccgcctgctagaggcaggagagaaagaagaaagacaagcactcccattccgccgatccagtgggtaaagcttctccagaaaaggactgatttcggaagaatttccacgtcagtcaggatactggaaccggtagtggtaaaaccggatactgtttcaaaaatcgcatcaatgggatgcggaatcgcgccggaaagtataaagggaatcgctccggtgatactgagaacaatccagctgagggcaactgcaatacagccgtcttttatataaaatactttattttgaggcttcttgtttgtcaggggcagaccaacggcaagacagatgacaatggaaacaagaaaagctccaaggtcagtttctccataaataacagcagtcaggcatggaagaaccataaatatcgcctgaagattaaatacccatccaacaatataaaaaataatacggtaattcatgattgcaccccttatttctcaaggatatcgcagatattgcgaagtcccttgtgtgtagtagcaacaattacatgatctcctacctctacggtgtcatggccgcggggaatccgtacagatccgttacgggtgaggcaacagatcagaagattttttttcagcttcagttcagaaagtggaacccctgtcactggtgaatgatcgtgtactgcaaattccagagcttctgcctgactgtccagaatatggtaaagagtttctacattgctgccaatggtattctgcatagcccgcacatagcggagaatactgtctgaggttatgtattttgggtagatcacacttccaagatccagatcgtcaatgacgtctgtatagggcagacggtttacctttgccactacttttgcattggagctttttttggcaaacagagagagaaaaatattctcttcatcaaaattggtaagcgtaacaaaggactctgcagtttccagaccttcctccagaagaagggcgcggtccgttccgtcgccgttgataatggtggcatccggaagcagatcgctgagaaattcacagcgattcggatctttttcgatgatctttacatggattcgggtatcaatcagagtttttgcaagataataggaaatagttccgccgcctatgatcagcgcatttttcacctggtttgtccgaaaacctatttttttgaaaaacagggcagtattctgtggagtggcaataatagagacaaaatcaccgtcatgtatgatatagtcgcctcccggaatggtaagcgcatctttgttttccacagcacagaagagaatatcgcaccggaatttttctgtgatccgggaaatgctcatgccgtccagatgaaattcaggaaggaccttaaattttaaaagctctacctttcctctggaaaaaggatcaatttttatggcagccggaaaacgaagcagacgggaaatttcctgagctgcagcgtattccgggttaatgatcatggagatacccagcttttctttgataaatccgatttcctgactgtagatcggattgcgtacccgggcaattgtctggcaggagccggttttctgtgcaatcaggcagcagagaagattcagctcatctgaagcggtaacggcaataagaatatcggcagtgctgatgcctgcctccattaatgtattgatgctggcgccgtttcctacaatacccattgcatcaatatcctcagtaacatcgttgatcgttttttctacagtatcgataagcgtcaggtcaatttcttcctcctgaagctgctctgcaagggtacgtcctacttttccgcacccgacgattatgatatgcatggtttcctccattataaaaaatattatataagcgtccttattatagcattgtaggaacagtttttaaataggaaaaatcttttgacttcatgagttttcaggagattttttgtgctttttttagaaaatcagaatgaaattaaaagaaaagaaatagctcctgtttccagatcattgttctgacagttacttttagcatatatatcagaatcccgagatataaacaggacaaaataccattacagaaagtgacttggaatgcatgttgtccaggtttctgtgaatagagtgggtagcaacaaaaagatagatcgataaatacagggattcctgtgtgttttatgtgagcaatttatggtatgataaaggggcataagataaaatacagaaaacggggtgatgattatggatatggaaaccgtaaatgaaactgttgaaaaggtggatcagggactggaggaaataggacttggcggagtatcagataatataaaggagattttgaatctgaaagaatatatggcaggtcagattcctgcgatcgtaggctttggtctgaaggtggtacttgcgattattgtattttttgtaggaagaaaactgatacgctgggcggtaaagctgatgaagcgttccatggaacgtgcgcggctggacgagggcgtggtgcagtttgcatgttccgcaggtaaggcagttctgtataccatgctgatttttaatattgcagtcagcctgggagtaacggaatcttcggtggcagctctcctgggtacagcaggtgtggccataggtcttgctcttcagggaggacttgccaatctggcaggaggagttcttcttctggtttttaaaccgtttgtggttggggattatattattcaaaaccagcagaatggctgtgagggaaccgtggcaaggattgaaatgtgctacaccacacttcttagcattgacaacaaaaaaatcgtggtgcctaacggaacactttccaacagtacaatcatcaatgtcacagcaaaagagacaagaaaactggaaataaaagtagggatttcctatgagtcgaatattcagaaggcaaaggaaattttggaaaaaattcttctggaggatccggacacccagggggacagaagcgaaatggtggtatttgtggatcagcttgcagacagcgctgtgatcatgggactgcgcgtatgggttcctacggattcctactggcctgtgaagtggagactgaatcagaagattaaagaggagttcgacgctcagggaattgtaattccttataatcagatggacatctatgtacaccataaagatcaaacgtaaactaaagtataaataaagttgacaatgtatcttccctgtgttaaagtaagacagtcaaaatgtgttacagcaggaggaaaagagatgaatacaatggcagcagcaaaaagtaaaacctatgatcttgtttatattgcggtatttgcagtactgatggcagtctgttcctggatttcagttcctacagcagttccttttaccctgcagacctttgcagtatttatggcagtaggtgttctgggaggacgaagaggtaccatgtccgttgctctttatattattcttggagcagtgggagttcctgtatttgcgggaatgacagggggaatcggaattctcacaggaacaaccggaggatacattgtgggatttttattttctgcccttgttatgtggacaatggaaaagattcccggaaaaaaatctgtaatacagattttatctatggctgtgggcctgattgtatgctatgcttttggtactgtatggtttatggctgtgtatatgaaaacaagcggtccggtaggcttgatggcggttcttggatggtgtgtgataccctttattattccggacattattaaaatcgtgatggcatatggtttgtccagaaaattaaaaaagtatatcatgtaaagcagaatcggggaacctccccggttttgttataatcaggagagaatatgaaagaaaagcaaaacagcatctgcctgcgccctcatcatggtatgtgcctggcttattttgagggcaggggttacagccgggaatttgcagagcatatgggaaaaattctggatattatggaaagagatgccagggtatctttaacagttgggggcgatgtaatctgttctgcctgtcccaacctgaaggggcaggtttgcgtgactgcagaccaggtagcggaatatgacagaaaggtacttctgttatgcggattacaggaaaatgaaaccatttcatttgcagagtttacagaaaaagtagaaaaattgattttacagccgggaaaaagaaaggaaatctgtggaaactgtcagtgggatggaatctgcagtagcagaaaaagcaggtggataaaagaatgaggatgacagaacaggaactggaagcttatatccgtcagtatacagagctggaaaaagaatgtatgaaaagcaggtttccggaaaaattcagtaatgaaaaaagcacttgtaaacagtttatatgcatgatacaaaaagaggcaaaagctgtgttaaaatatgcttgattataggacttgtaaacaaatagaaattggaatatgatagaaaaaagaattcattatttttacaagtaaattcgggaaaatgaaacggaggattcaggaaatgaaaaaaaagattgatgtatttgagtatacaggacagattttaaatggtgtaaaatcaggcgttctgattacatcaaaatcagatgagagggtaaattccatgacaatttcctggggaatgcttggaattgaatggggaaaacctgtttttattactgtgatcagagagggaagatttacaagagagcttctggaacagaatggagaatttacagtaaatataccccttgatgacagccagaaaaaagctcttggtttttgcggttcaaaatccggacgtgacgtgaacaagctcaaagaacttggcctgactctggaagagccggaaagcatttccgttccaggaattaaagagcttcctcttacattggagtgcaggattgtctacaaacagaagcaggatattaatgcaatggaaaaagaaactgtagaaaaattttatcctcagaatgtagagagctcttttacaggctctaatcgggatgtacatattgcatattatggagaaattgtcaacgcatatattattgagtaaattttaagtgattccccggccgtaacgaccgggggatttttatcagcattttttgcaggaagcctcgcagggcatgtcaaaggacgggttgaaggcgtagaagtttttggagtcaagctgttcctgaacacttcgaagggcttcaccgaatctctgaaaatgaaccacttctcttgcacggagaaatcggatgggatctgcaatctcagggatgttgcgtaccacacggagaatattgtcataggtggcacgggctttttgctctgctgcaagatcttcaaaaagatcggtaaggggatcgcccttactctggaattcacaggcgttaaatgggatcccacccgcagcctgaggccatatgcctaccgtatggtcaatataataggcgcccagaccacttttttctatttcctccatggagagatcgcgggtaagctggtgaacgatagtagataccatctccagatgggccagctcttccgtgcctatatcgtttagtacagctgttgccattcggtttggcatggaaaagcgctgggaaagatagcggagggaagcactgatctcaccgtccgggcctccatactggctcatgataaactgagcaagcttcgcattaggggttttaatgttgatgggatactgcaatcttttttcataattccacataagttatctgcatcctccttccgtttcccatgggaatggctgttccatccatttccaggtgtttccgtctgattccagagcatcatctacagtaagaggaccataacactgcgcatattctttcatcagcttttttcgttctgctgcatattcacggtaaagtgccattcctttttcgcagcagggatgtgtgtccagataaaggagaatatcattgactgcaaagctgacttcattgattttctgaagaagctgtgctttggagcctgaagaattctgatacatcatcttcgtccacctctctttccgcaaaatggtttgcaaagctgcggaaaaatcgttcccacattcagtgcataacacagatcataggtagtggtaagctgctggcagggcacatatgccattgctggctccatatgatctgcatgggtgtacatttccggatttattgtaactgtattgggcatacggcaggcacaggactgattcttatgctgttctgtacacggacaggaagaagacctggctgccatctgtgctttagccataccgcaggttgcatggtatggacgtccacaggaacggttcacatgataattttccatgaacaaatcctttctgataaattgagataccatatattttatgtcataaaaacggaagtgtgcgaataggaggattagctgatttgaaatcttaaattccagtgtaaaatgaaattccatatggggtgagtaacaggaagatttcgttaaaatccattgcctaaatcatttaaaaaatgatacaataaaagcagaaattttatcatttttcaaggagacggattatgattttaacagaagataaaacgtatacgatatccctggagcaggaggactgtggcagcactacgggcctggtaaataaaaatacagagctggtattttctaataaggagctgctccatgcagtggttacctgcggaatgcctatccagagaatgacagcttcttttttatcaaaaaagaagctggagcttacctataaaatgtttcttgtggagactgctcttgacacagagggggaccgtctgaaaaaagcaaaacggattgcttatctggattcttctgaaaagagtgtgatgtcctattatatgggaatgtttctgacaaagcttatcagcggaaggctttacggagcagactatctgacgcatctgaacctgatcagcagtattgatcagaaagaatttattgacttctttaacagtgaatggcggcaggatatgatcggactgagcatacctaaaaaccagtggagtgtgtgggaagcaaaaggaggaagcaacagaagagagcaggctttgaaaaagggaagtcagcagatttcagatatagaatctgtaaatggaaatgtacctgctccggcggctgtgtgtatgacttattatgatcacagctatctttgcggagtggtacgtcagcctgaaagtgaccggaaagaaaaaaaagagtgtatcagatttcaagaggaagattttttcagagcatattaccagcctctttgtgagctgtttatggaacagggagaggggcttcgtctttgtgggaaaaatgtagaaatttccctgacagtaccttatttttctgaaacagagtccaaggaggaagaacgtagagtccgtgtaggaatgcccagaaagcttttgtattgcctgatggagaatgagtacgagaattttttgcagaaaagaagtgaactgttggattcagaatatccggaagatgcttttgtggggacagatggcatttatatcaggtaggaaaaactccggcagagaagtaacagaatcgtttcttatttcataaaataaataaaaaaggttttgtcatgacattttcttcttatgaaaaggtaactggagtaatccgggatatcaggagtggaggttcctgctgctcgcttctgatttccgttgatacagatggagaaattgtgaattttgtggtgtcgggtgataccattgttgtggataacaccagactcaggcgggggatgaaggtagctgctttttatgataccagccttcctgcaccggctatttttccaccccagtatcaggcggaactggtgactgcattaagagtcgggcaggatgttgcgctgaagttttttgatgatacgctgactgcagaagatggatctctgaaactgaatctttcccctgtcacaaatatacgcactttgaacgggcagcgttttatgtgcagcccggaagggcaggatctgctggtttactatagctctgtgacaaaaagcattcctccgcagactgcgccgcaaagaattatcgtgatgtgtccgatgcagtagcttatgaaaaagcacaggaatttttctgtgctttttcatttaataaggatttggacggaggatctgattgaatcaaaaaagaccaaagtgcatgattttttactgtacatcctgacagatattgcagagattgaaaaagtaacccttgattcaatggtgaaggtgacagaactcaggataaaggaggcagttatgtggattttttatgcaataggctcttcgttttttgcaggaattacagcaattcttgcaaaatgtggaatacagaaaacagattccgatgtggctacagccattcgaacagttgttgtactgatattttcctggctgatggttctgattacaggagccgggagcgggactggaaaaataggtacacggacaatggtatttctggtattgtcagggctttccacaggagcctcctggctttgctattatcatgctttgcagcagggcccggcaagtgtggttgttgctgtggataaattaagcatttttgttaccattgcattttcgtgggctgtatttcatgaaaaactgactaaaaaagcagcattgggcgtggcatgtatgactgtgggaactttgcttctggcagttatgtgagggatgtcagagatatgtaatatcatttgctttgggcaggaatgggaggttatatgattgtcagcaaaatttaaggagaactgcatggatcaggaattgaataagcctatgtttgtgcctgtcgacaataaaaccctggcatccagctttacggcgagtttaaaggattcttcccggacaatgggatggaatattttgtcttctggcattttgatattaaattgcattgagatgtcccccagggtttgaaaacctgagggatatttttatgtaaacagatgttatgcgaataagtgcaacaggtgatttttatatcataaacggtatgaatgcagacgctgcttgatgtagaagtaaggatttccactggaaacgctgcaaacagctattaagagttgctaaccatggatgtacatggtaataatttgaaaagaacaaatgttcaaatcccatatacaattttattttttcatggtacaatatctcttaaatttaagtgttaattcgtccatgctaggttcactattttttaatgtacttcgacgaatttctgcctgacagacgaacgtttattttatgatataaaaaccaggaggtgcttttgtgcagaacttacaacaaatcttcaaacttcactctgaatacaaaccaactggcgatcagccacaggcaatcgaaaaactggtgaagggcttcaaagaaggcaaccagttcgagactttgctgggtgtcacaggttccggtaagactttcacaatggcgaacgtcattgccaagttaaataaaccaactttggtgcttgcccacaataaaactctggcggcacagctctacggtgagtttaaggaattttttccggagaatgcagtggaatactttgtatcctactacgactactaccagccggaggcctatgttccttccacggatacatatattgcaaaggatgcgtctaccaatgacgagattgataagatgcgtctttctgcaactgcggctctatgtgagagacgggatgtgattgtggtttcttctgtatcctgcatttatggtctgggcgctccccaggagttctttgatatgatgatctctctgcgtccgggcatggaaaaagacagggatgaggtcatacggcagctgatcgacattcagtatacacggaatgaaatggactttcatagaggtaccttccgggtgaagggagatgtgcttgaaatttttccggccaatgccacagaccgggcggttcgtgtggaattttttggggatgagatcgagcggatcacggagattgatgtgctgaccggcgagattaaaaatgaagagagccatgtaggaattttcccggcctctcattatgttgtgcctcaggagcagattaaaaaagctgcagatgccattcttgcagaaatgaaggagcaggtagattattttaaaggtgaggacaagctcattgaggctcagagaatagcggagcgaactaattttgatgtagagatgatgaaagagactggtttctgctcaggaatcgaaaattattccagacatctgaccggactggctccgggacagccgccttatacattgatggattattttaaggatgattttcttcttattattgatgagtctcataaaacagtctctcaggtaggaggaatgtatgcaggcgatcagagcaggaagcagactctggtagattatggtttccgtctgccgtcagctaaggataaccgtccattaagctttgatgaatttgaaggtaaactggatcaggtgatgtttgtgtcagcaactccggggcagtatgaggctgaccatgagctgcttcgggcagaacagatcatccgccctacagggcttcttgatccaaaagtggaagtccgtcctgtagagggacagattgacgatctgatcagcgaggtcaacaaagaggttgaaaagggtcacaaaattctgattacaactctgaccaagcgtatggcagaggatcttactgcttatatgaaggatgtaggaatccgtgtccggtatcttcactcagatattgatacactggagcgcgcggaaattatccgtgatatgcgcctggatgtatttgatgttctggtgggtattaaccttctcagggagggattggacattcctgagattacgctggtggcaattctggatgcagataaagagggatttctccgttcagaagtctctttgatccagaccattggccgtgcggcacgaaacagtgaaggccatgtaatcatgtatgcggatgttatgacagattccatgaaaaaagccattcaggaaacagagcgccgccgaagtattcaggaagcttataataaggagcatggaattactccaatgactattaaaaaggcggttcgtgacctgatcacagtttccaaagcagttgcggagactgaagtgaagctgaaaaaagatccggagtccatgagccgtaaggaattgatgaagctgatcgcccaggtagaaaagcagatgcgcgcggcagcagcagatctgaactttgagcaggcggcagagctgagggataagatgctggagctgaagaggaatcttcaggaattggaatagataaattccccttcattaatataaatgcaggcatttcagataagtattttctggagtgcctgcattctttctgtataaaaagattttcataaaaatacttcttatctcttgacaaactattttaacggtgctatcttaacaatgtagatgttagcactccttgatattgagtgctaataaagggaaaggagctgagggcgtggaagatattttgactgatcgtaagaagaagattttaaaagcgatcatcaagacctatatggaaacaggggagccggtgggatcccggacaatttccaagtatacagatcttaatgtcagctcagcaacaatccgaaatgaaatgtctgacctgacagatttgggctatattgtacagcctcatacctctgctggaagaattccttcagataaagggtatcggctgtatgtggatgagctgatgcaggaaaaggaagatgagattgaagagatccgaaatctgatgattgagaaaacagacaagatggaaaaggtcctgaaaaaggtagccagagttcttgcctgcaataccaattatgcaacaatgatctcagttccccagtacagcggaaacaagctgaaatttattcagctttccagagtaaatgaacttcagctggtagctgtagttgtctgtgagggaaatgtcatccggaaccagattatagatcttgatgaggaaatggatgatgagacaattttaaaactgaatcttcttcttaatacaaatctcaacgggcttccgattcaggatattaacctgggaatgatcgcaaggctgaaggagcaggcgggaatccacagcgggctggtagccagtgtactggacgcagttgcagccactatacatgtggatgaagaggatctggaaatctatacgtcaggcgctacgaactttttcaagtatccggaattatcagataaggaaaaagcaacgggtttgatttccgcatttgaagaaaaacagcagcttgcagatcttgtaaaggaaagcatggcagatgcagacaacacaggcgttcaggtgtatatcggagatgaacttccgattcctaccatgaaagactgcagtgttgtaacagccacttacgagttaggcgaggggatgcatggaacaattggcatcgtaggaccgaaacggatggattacgaaaatgttgttaataatctgaagaccctgaaggttgaattagatcaggtatttggaaaaaataaaaaggaaaatggtgacagccagcaggctggatagaaaggtggtagagaacgcgtggcagaagaaaagaagaacgcagctgaagtacaggaagatacagaaaaagaaatttctgaaaacgagactgtaacagaggctcaggacgattcaccggaagccacagccggagaaaataccgcagaggaaagcgaagcttccgcggatgaaaaaactgagggaaaaacaaaaacctctttctttggaaaaaagaaaaaggataaaaaagatcagcagattgaagagctgactgaccggctgaaacgcagcatggcagagtttgacaatttccgtaaacgtacagaaaaagaaaaatccagcatgtatgtgatcggcgcaaaagagatcattgaaaatatgcttccggtagttgataactttgagagaggacttgcacaggctcaggagggagatgcttttgcagacggcatgaagatgatctacaaacagcttatgacaacactggagggacttggtgtagaagcgatcgaggctgtcggcaaagaatttgatccggatttccataatgcggtaatgcatgtggaagatgaggaagccggagacaatatggttgtggaagagcttcagaaaggctacacctataaaggatttgtagttcgtcacagtatggtaaaggttgccaactgacccagagcacttaatgaaaacaagccgtatggcgcaggttgaatttagtgcgaaggtcgctcgaaggaacttaatgaatccgaccgcagggaaggatgaatttagtgaatcgagcattcttagataataagtagtcatggatatagagacaaagaatgaaaataaatcaggaggaaaaattatcatgggaaaaattattggtattgacttaggtacaacaaacagttgtgtggcagttatggaaggtggccagcccaccgttatcgcaaatacagagggtgcaagaactacaccgtctgtagtagcttttacaaaaacaggagagcgtctggtaggtgagcctgcaaaacgtcaggcagttaccaacgcagaaaaaacaatctcctccattaagagagagatgggttccgattaccgtgtaacaattgacgacaagaaatactctccgcaggaaatttccgctatgattcttcagaagctgaaaaaagacgcagagggatatcttggagagactgtaacagaagcagttatcacagttccggcttactttaatgacgctcagcgtcaggcaaccaaggatgcaggtaagattgcaggtcttgatgtaaaacgtatcatcaacgagccaacagcagcagctcttgcatatggtcttgacaatgaaaaagaacagaagatcatggtatatgaccttggcggcggtactttcgatgtttccattattgaaattggtgacggtgttatcgaagttctttctacagcaggaaacaaccgccttggtggtgacgactttgaccagaagattacagactacatgcttgcagagttcaagagaactgagggcgtagatctttccagcgacaagatggctctccagagactgaaagaagctgctgaaaaagctaagaaagagctttcttctgcaacaactacaaacatcaaccttccgttcatcactgcaacagcagagggaccgaagcattttgatatgaaccttacaagagcaaaatttgatgagctcacacatgatcttgttgaaaaaacagcagagccggtacgtcgtgcactgtctgatgcaggcatcacagcttccgagcttggccaggtacttctggtaggtggatctacacgtatcccggctgtacaggataaagtaaaacagatcacaggcaaagagccaagcaaatctctgaacccggatgagtgcgttgcacttggcgcttccgtacagggtggtaagcttgcaggagatgcaggcgcaggcgatatccttcttctggatgttactcctctgtctctttctatcgagacaatgggtggaatcgcaacacgtctgatcgagagaaatacaacaattcctacaaagaagagccagatcttctccacagcagcagacaaccagactgctgtagatatcaatgttgtacagggtgagcgtcagttcgcaagagataacaaatctcttggccagttccgtctggacggaatcccgccagcacgtcgtggtgttccgcagatcgaggttacttttgatattgatgccaacggtattgtaaatgtttctgcaaaagatcttggaacaggaaaagagcagcacattactattacagcaggctccaacatgtctgattccgaaattgacaaggctgtaaaagaagcagcagagtttgaggctcaggacaagaaacgtaaagaggcaattgatacaagaaataatgcagattccatggtattccaggttgagaatgccctgaaagaagcaggcgataaaattgatgcaaatgacaaagcagcagttgagacagaccttaacgcactgaaagatcttcttgcacagactgcaaatgctgagatgacagatgcacaggtagctgatatcaaggctgcacaggaaaaaatgatggaaagcgctcagaagctgtttgcaaaaatgtatgagcagacacagcagggcggcggccaggcaggcccggatatgggcaacatgggcggcggagcttcccagggtggaaacgaagccggatatggcgatgatgtagtagacgcagactataaagaagtctgatagaaagcacaggaaagagaaacgatggctgataaaagagattactacgaagtcctgggcgttgcaaaaaacgccagtgacgcggaactgaaaaaagcatatcgaaaattagccaaaaagtatcacccggatgtaaatccgggtgataaagaagcagaggcaaaatttaaagaggctacagaggcatacggcattttaagtgatccggataagagaaaacagtatgatcagttcggtcatgcagcctttgaaaatggcggcggcggtgccggaggattcggcggctttgactttaacggcgctgatatgggcgatattttcggtgatattttcggtgacctgtttggcggcggaagcagaagacgtgcaaacaatggaccgatgagaggcgcaaaccttcgtgcaagagtgaatatcacttttgaggaagctgtatttggctgtgaaaaagagctggaaatcgttctgaaggatgaatgtacggattgtcacggaacaggagcaaaacccggaactcagcctgtaacctgtccgaaatgtaatggagaaggacagattgtatatactcagcagtccatgttcggtatggtgcgtaatgtccagacctgtccggaatgcggcggtacaggaaaagtaatcaaagaaaaatgtacttcctgccgtggaaccggatatacatcttccagaaagaagattcaggtatccattcctgctggtattgacaatggacagagcatccgtattcgtgaaaaaggagaaccgggcacaaacggcggcccaagaggcgaccttcttgtggaggtaaatattgcccgccatcctattttccagagacaggatatgaatattttctcttctgcgcctattacctatgcgcaggctgctcttggcggagaggttcatatcaatacagtggacggagacgttgtttatgatgtgaagccgggaactcagactgatactcgcatccgtctgaaaggcaagggtgttccttctctgagaaacaagaatgtccgtggagatcattatgtgactctggttgttcaggttcctacaaacctgaatgaagaggcaaaggaagctctccgcaagtttgacgaggcctgtggaaacagaccgtcagagacaaacagcgaaggcacagagaaacatgaaaagaagaaaaaaagctttatggataagctgaaagagacttttgaagattaataaatcttttaaagaaaagagggaaacctcttttctttttttgttctttcgtgtatgataaagtgcgaggtattataagtataacaaagtatcagccggaagcccggcagatcatagaaacatatattttatgataaaacaggagatttgttatgaagtggaaaaagtttaaaataaaaaccagaaccgaggcagaggatatcattatcagcaccttatatgatattggcctggaaggtgcgcagattgaggataatgtacctcttactgcgctggaaaaggagcagatgtttgtggatatccttcctcagatgcaggaggatgacggaactgcatatctgagctttttcgtggaggaagcagaggacggaaaacttctgaaaaacggccaggagacagatgcagaatccattctgaaagaagtaaaagaagagctggaagctttaagagcttttctggatatcggagagggcagcattgaggttgacgagacagaggatattgactggatcaacaactggaaacagtattttaaacagttttatgtggatgatattctgatcgttccctcctgggaggaagtaaaggcagaggatcaggataaaatgatccttcacattgacccgggaacagcctttggaaccggtatgcatgagactactcagcttgtgatccgccagctgaaaaaatatgtgaaagagggctgcgagctccttgatgtgggaacaggaagcggtattcttggaattactgctctgaagcttggcgcaggccatgtagtgggaacagatcttgacccctgcgcagttcctgcagtccaggaaaacaaagaagcaaaccagattccggataaagcttttgatatgatgatcggaaacatcattgatgacaaagaggttcaggatcaggtgggctatgagaaatatgatattgtagcggcaaacatccttgcagacgttcttgtgcctcttactcctgtgatcgttcatcagatgaaaaaaggcgcttactatatcacttccggcattctggatgtaaaagagagcgttgtgacagaagctgtgaaaaatgcaggcctgactcttgtagaggttacaaagcagggcgagtgggtgtctgtgacagccagaaaggactgatccatgcagagattttttgtggagccgtcccagattgatgagggggctcatcagatccacattacaggaagtgatgtgaagcatattgtaaatgtgctgcggatgaaaaccggggaagagctctggatcagtgacggagacaaaaaagaataccactgtaccattgaagccattgatgcagaagaggtctgccttcatattctttattctcaggagccggactatgagcttccaaataagatttatctgtttcagggtcttccaaaggcagataagatggagctgatcatccagaaggcagtggagctgggagcctgtcaggtgatcccggtagaaaccaaacgctgtgtagtccgtcttgacggcaaaaaggctgcaaaaaaggtggaacggtggcagcagatcgcagagagcgcggccaagcagtccaagcgtatgctgatcccttcggttcatccggtgatgacctttaaggatgctcttgcctgggcaaaggagctggatgttcggctgatcccctatgagcttgcgcagggaatggctgagacaaaagcccttttgtctgaaatccgtcccggacagtccattggtatttttatcggtccggagggaggatttgaggaaaaagaaatcgaagcggctattgacgcgggagtttctcccattactctgggaaaacggattttgaggacagagacagccggacttgcgatcctgtccgtgctgatgtttcagctggaacagtaaaacagaatgcagagtccggcaggaagctgcagtaaaataaagggagtttatcatggaagtttattttgataattccgcaaccaccagatgctacgattcggtaaaggatattgtggtaaaagcaatgacagaggattttggaaatccctccgccatgcatctgaagggtgtggaagcagaaaaatatattaagagttccgcagaaagccttgcccgtcttctgaaggttcaggaaaaggaaatcctgtttacctcagggggaactgagtcggataatctggctctgatcggagcggcttttgcaaataaaagaagcggaaatcatattatcaccacctcagtagagcatccggcagtaagccagcctgcgcttttccttcaggaacagggctttgaggtaacctaccttccggtggacagccgtggtgtggtaaaaatggatgctctgaaagccgtactcagagaagataccattctggtatctgtgatgtatgtaaataacgaagtgggcgcagtgatgccggtggaggaaattgcagcccttgttcacgaaaagagcccgaaggctctgtttcatgtagatgccatacaggcctttggaaagtacagaatctacccgaaaaaaatgggaatcgatcttctttctgtcagcggtcataagattcatgggccaaagggcgtgggctttctttatattaatgaaaaagcaaaaatccagccgcagattcttggcggaggacagcagggcggaatgcgttccggaacagacaatgtaccgggaattgcaggacttggcgctgccgctgtggaaatctacaaaaatcttgaagagaatgtggaaaacatgtatcgtctcaaggaacacattgcgcagggccttgagaagatcggggacatccgcatcaacggtatggatttaagagagggagcgcctcagattctaagcatcagtgttatgggcgtgcgaagcgaagtgcttctccattctctggaagaaagaggcatttatgtttccgcaggaagcgcctgctccagccacaaacgcaagcccagcgccactctggcagcaatgggtatgtcaaaagatcagatcgaaagcactgtgcgcttaagcttttgtgaggaaaacaccatagaagaggcggattacttccttcaggttatgggagaactggttcccatgctgagaagatattcaagaaggtaaaagatacaaaaaggagaacatttatgatatttcatgcatttctgattaagtatgcggaaatcgccattaaaggcaaaaacaggtatctttttgaggatgctctggtaaaacagatgcgtcttgctttggaacctgtggaaggagatttccgtgtgatcaaggagcagggccgtgtttatgtgctctgcccggaggaatatgattttgacgaggcagtagaagcgctgcagagagtttttggtattgtgggaatcagtccggttgtgatctatgaggatcagggctttgagcagatgggaaaagatgttgtaagctatatgaaggcaaggtatccggagttttccggaacctttaaggtttatacaagaagagccagaaaatcctatcctattaattccatggaggtcagcgcaagtcttggtgggctgattctggacgcttttccggaggcttctgtggatgtccacaatcctcagcttacactttctgtggagatcagagagaagatttacgtttattcagaaactattccgggatcgggcggaatgccggttggaacaaacggaaaggcaatgctgcttctttccggcggaattgacagtccggttgccggctacatgatcgccaagagaggcgtaaaaattgatgcggtttatttccatgcgccgccttacaccagtgagagagcaaagcagaaggttgtagatctggcaaagcttgttgcccgctacagcggacctatccgtcttcatgtggtaaactttacggatatccagctttatatttacgaccagtgccctcatgaagagcttacaattatcatgcgccggtatatgatgcgtattgcagagcattttgcaaagaaatgcggctgccttggtctgatcacaggagagagtattggacaggtggcaagccagaccttacagagtcttgcggcaaccaatgaggtgtgcacccttcctgtgtaccgtccggtgatcggatttgacaagcaggagatcgtggagatttccagaaagatcgatacctttgagacttctatccagccctttgaggactgctgtacgatttttgtggcaaaacatccggtaaccaagccgaatctgaatgtgatccacagatctgaaacaaagctggaagaaaaaattgatcagcttatggaagaggctctttctactgtagaagtgatcgagattaactgacagaattgtcagaaatcagaaacaggcaaaaaatatccggcggacatctggaatgtttcccgaatgtaccgccggaataaatgccgtatggaatgtgtgacgaagcttagccgcctgcacagggtcagtgatattactcgatcacatatgcctgaacaactgcaaggatagcatccagagctgcgccttctgcatggatattcaggttgatcggcttggaaagatccagactgaagattcccatgatagattttgcgtcaataacatatcttccggatacaagatcaaaatcacagtcaaatttactgatttcatttacaaatgctttcactttatcgatggagttcagtgagatttttaatgttttcattacgatataacctccctaaaaattattgtatttacagcttttatcttatacgtccactgataaaaagtcaagggaaaagctgttaaatttccatgaaataacaggaaccgagttactgttcaccaccttcacggtaacctggtcaaaatgcattccagatcacctctggcgatggtattttgccatgtacgttccgggattccggcatatatgccagagcaccttacggaaaaatgacctgtgaacagtaacagaatcaatttatatcagtagaaaaggaatgaatataaatatgagtaaaaaagttgcgcttcataatctgggctgcaaggtaaacgcttatgaggtagaggcaatgcagcagcttctggaacaggccggatatgaaattgtcccttttcaggaaggggcggatgtgtatctgatcaatacctgtacggttactaacattgcggaccggaaatcaagacagatgctccataaggcaaaaaaaatgaatccggaagccattgttgttgccaccggctgttatgcacagacagacacagaaaaactaaaggcagatacatctgtagacctgatccttggcaataatcagaaaaacaggattgttgaggcccttgctgaatatgagaaagaacacgcaaaaaaagcctgcgtgatcgagataaataaaacaaaagaatatgaggagctttccattgaccatacggcagaacatgtaagagcctatattaaggtccaggacggatgtaatcagttttgtacttactgcattattccctatgcaagaggcagggtgcgcagcaggaaaatacaggagatcctggaggaagtaaaggctcttgcggcaaagggctatagggaagtggttcttacaggcattcacctgagttcttacggcattgactttaaggaggcggaagaaagacagacccttctttcgctgattcaggctgtacacagcgtagaaggcattgaaaggatccgcttgggatcgctggagccaaggatcattacccgggaatttatggaaggtatttccggtctttccaaggtgtgccctcacttccatctttctttgcagagcggatgtcagaagactctggaaaatatgaatcgaagatatacggcagaggaatatgcgcagaaatgcagcctgatccgggagtattatcctgcccctgctttaactacagacgtgattgtgggatttccaatggagagtgaagcagattttgaggaatcctttgaatttgtaaaaaacattcatttttatgagacacatattttcaaatattccagacgtcagggaacaaaagcggctgcaatggaagggcagatcacagaggctgtcaaagccgccagaagtgaaaaaatgttggagctgaacaggcagcgctcccttgaatatgaagagtccatgatcggaaagaacctggagatccttctggaagaggaagtggagcttcaggggaaagcatattatctgggacacagccgggaatatgtgaaggtagctgtggagaaaacagaaagtctgaaggtcaataatcttctgactgtaaaaatcacgggatttacagaggagcacatcctaggcggcgagctggtatagttgccctggagtgaacgatggccccgtacaaaactctccttgtattttgcggtgaattatattaaaatagaaaagaaataatagtaaggacgtgagagaaaatgacagaaaacaatttaggaaatacacagtatttcaggacaaagccggatcaggagctggaagtgaaagaggttctggatctggtgtataacgcaatggacgaaaagggatataatccggtaaatcagatcgttggttatatcatgtccggtgatcctacctatattaccagtcataaaggcgcaagaagcatgatcatgaaggttgagcgggatgaactggtagaggagcttctgaacgagtatattaagaaccgctcctgggaaagctgatatgcgtatacttggactggattacgggtcaaagaccgtaggagtggcagtcagtgatcccctgggactgactgcccagaaagtagaaaccatatggagaaagcaggaaaacaagcttcgcagaacacttgcgcgtattgaagagctggtagctgagtatggtgtggaaaaaattgttgtgggacttccgaagaatatgaataatacacttggagagcgggcagaaaaatctctggaatttaaagaaatgctggagaaaagaacgggactgcctgtggaaatgtgggatgaacgtctgacaacaatggaggcgaaccgcgttctcatggagggcggagtgcgccgtgaagacagaaaggaacatctggattcccttgcagcagtactgatcctgcagggatatctggactgttctgcaaacagataaggacagcaatatggaaaaaataaaatttcagaccccggacgggacaacagaagagttttatgtagaggaacagacaatgatcggaggcagatcctatcttctggtatcagattctctggatgatgaggcgtctgcatatattctgaaagactgttcttcccaggacagcccggaagcctgctatgaaatggtagaagaggaagaagaactgcaggcggtttataaagtttttgagcagatgctggatgatgtggatctggaaatgtaaggttttcggacaggacggacaggaaattcaggtactgtgttttaaaactcatgaaaatgaaacgaaaataagcgaaatttaacggatgatgaaggaatgtcactggcattcctgagttgtcgtgcggaaatttgcacatgaaaatggaggtgcattatttgaacagtgataataatacaaaaaaagaaacagatgaaaggcagaaaagaaacggcagttatggaagaaatgccggttataatacaagaaaacaggtaaacagatcaaaaaataataaatacaggcctcaggcaaaacagaacagcagatatcaggaaaaatctgcggaaagatatcccgaaaagaatcaggacaggcagcagaagcctgtattaaaaaattcttccagaaattccatgaataaaaatacaggaagaaactttcagaaacagggacgcagaggacggagaagcagcgagcgcctgaagatcattcctcttggcgggctggaacagattggaatgaatattacagctttcgagtacggagacagtatagtagtagtagactgtggtctgtctttcccggaagatgatatgctgggaattgatcttgtgatcccggatgtaacttatctgaaggacaatatctcaaaggtaaagggatttgtgatcacccacggacatgaggaccatattggagctcttccctatgtattaaaggacgtaaacgtccctatttattctacgaagctgacactgggactgatcaccaataagctgaaagaacataatcttgtccgttccacaaagctgaaggaagtgaagcatggacaggtgatcaacctgggtgatttttctattgagtttattaagacaaatcacagcattcaggatgcttccgcactggcgatttattcaccggcaggaatcgttgtccatacaggcgactttaaggtggattatacgccggtattcggcgatgccattgatcttcagcgttttgcggaaatcggaagaaaaggcgtgcttgctctgatgtgcgacagtacaaatgcagaacgtccgggctttaccatgtccgagcgtactgtgggcaaagtttttgacaacctgtttaatgaatttcattccagcaggatcattattgcaacctttgcctcaaacgtagaccgtgttcagcagattatcaatactgcgtaccgctttggcagaaaggtggcggtagaaggccgcagcatggtcaatgttatttcaacagcttcagagctgggatatctgagaattccggaaaatactctgatcgagatcgatcaggtaaaggattacccggatgacaaggtggttctgatcacaacaggaagtcagggagaatccatggctgccctgtcaagaatggctgctaatattcacaaaaaaataaccattaagccaaacgatactattattttcagttcaaatccgattccgggaaatgaaaaagcagtttccaaagtgatcaacgagctgtatatgaagggcgcaaaagttattttccaggatgctcatgtatcgggacatgcctgccaggaagagattaaactgatctattccctggtccgtccgaaatacgcgattccgattcatggagaataccgtcatctgactgctcagaaacatattgccgaggagcttggaatcccaaaagaaaacatttttattcttgcatcgggaaatgttctggaagtggatgagaacagcgcccagatcacaggaaacgttcagacaggagcgatcctggtagacggacttggagttggcgatgtgggaaatattgtgctcagagaccgtcagcatctggctgaggacggaattatgatcgtggttatgaccctggaacgtcacagcaatgtggttcttgcgggaccggatattgtttccagaggctttgtgtatgtccgtgaatcagaagacctgatgggacatgccagggaggtagtggagcaggctctggattcctgcatggacagaaatattacagactggggaaagatcaagcttgttgtcaaggatgcggtaggcgactatctgtggaagcgcacaaagagaagaccgatgatccttccgatcatcatggaagcataaactggactggataacagaatggaatggaaatggatgatattccgctgctctgaaacgggcggacagtaaggaggataacatgggagacacaagagaccgggtaggaaatgcgggagtgatcgttgcaggcggcgcttttaaaattgcgctttatgtctgtattgttgttctgatcatctggctgggaagactgtcttatcaatccggacatgatatttttgaccagcagcccatgagtcctggagaaggacaggagatcactgtggtagtcaaagaggatgattctgtgtatgacattgcaaagactctggaaagcaaagggctggtggaggatgcaaaggtgttctggattcaggaaaagctgtccaattataaaggacagatgaaaccgggaacttatcttctgagtactgcctatgaaccttcaaggcttcttgcaatcatggcaggggatgctgagcaggagggcgcagactcgtgatcgtagaagagagaatgagaacctacatcaattctctggatatgggaaatacagattttctggaaagtctggaaaaggaggctctgtcatccggagttcccattatccggagagagatgcagagctttataaaggtgcttctggctgtaaaaaagccggagcgtattctggaggtggggacagccgtaggcttctccacacttcttatgtgtgaatatggacctgagaagcttcaggtaacaacaattgagaactatgaaaaaaggattcccattgccagagaaaattttgcgaaagcaggacggagccatcagatcactcttctggagggagacgcaggacagatcctccgggagctggaacctggttttgacctgatttttatggatgcggcaaaagggcagtatattcactggctggaggatgccgtgcgtcttttgaatccggagggaatccttctttcggataatgttcttcaggagggcgagttgattgaatcgcgctatctggtagagcggagaaacagaaccatttataagagaatgcgggattatctttatgctctgaaacatgatgaaaggcttctgacaagcattcttcctctgggagacggagccgccctcagtatcaggcagccgtttggacaggaaacgtcccgcagtaaggagacaatatgagaaaaatagaattactggtacctgccagcagtctggaagtcctgaaaattgcagtagtatttggggcagatgctgtgtatatcggcggagaagcttttggtcttcgggcaaaagcaaaaaacttttccggagaagatatggcagaggggattgcttttgctcacgagcacggcgtaaaggtttatgtgactgtaaatattcttgctcataatgacgaccttccaggcgttcgggagtaccttcaggagctgaaggggctgaaaccggatgcgctgatcattgcagatccgggaatttttacttatgcgaaggaaatttgtccggaaattgaatgtcacatcagtacccaggcaaacaacaccaattatgaaacctaccggttctggtaccggctgggagcaaaacgtgtggtaactgccagagaactgtctctggaagaaatcggagaaatcagagagcatattcccgaggatatggaaattgaaacctttattcacggggcaatgtgtatttcctattcaggccgttgtcttctcagcaattatctggtgggaagagatgccaacagaggcgcctgcacccatccgtgccggtggaaatattctattgtggaagagaaaagaccgggagaatatatgccggtttttgaaaatgaaagaggcacatatatttttaactccaaagacctgtgcatgatcgagcatatggatgatgttcttacaagcggaattgacagcctgaagattgaaggccgtatgaaaaccgctctttacgtggcaactgttgccagaacctacaggaaagccattgacgattatatggaatctccggaaaaataccaggcgaatatggaatggtataaggagcagatctcaaactgtacgtaccgtcagtttactaccggatttttctatggaaaaccggatgagaatacacagatctatgataacaacacctatgtaaaggaatatacttatctgggatatgctgaagaggttgacgaaaagggtctggtccacattactcagagaaataagttcagcgtaggagaaaccattgagatcatgaagccggacggaagaaacctgacggttacagttcaggggatttatgacgagacaggagcttccgtggaaagcgcgccccatcctcagcagaagcttgcggtagatctgggggcagaagtagaaaaatatgatcttctccgaagggcggaggcataaagccctgtcatggaataaaagatattccggagctttataagctttggaaatacacccgaagaggagacgcataaaatatcagcaataaaaaatacaggaacagccaaagccaggcagttcctgtatttttttgtactgtggcagttcgcttttaccggtgagaaaacagaaaagtatcttctgctgtatacatattcaacagtgatttttcggttgttcatcaaaaagacagcggagttttttcagtgcgtttttttcaatgcgggaaacgtaggagcgactgatggaaagcttccgggcaattgttttctgagtttcctcagaagctccgaacagaccgtaccggaggcagatgacctggtattccctgggcgttaaagcagttttcagggaactgacaagatgacggatatcctgctgcgtggcatattgttccacaatatctacaggagggctttcaatgatatccagaaggctgatctcatttccttccctgtctgttccgattggatcatacagggagacttcacgggagcgtttttttctggaacggagcatcatcagaagctcattatcaatgcagcgcgccgcataggtggaaaggcgcgtggatttttccgcatcaaaggtgctgatcgctttgatcagaccgatagttccgatggagatcaggtcttcaggatcttcaccggaaccctgatatttttttactatgtgggcgaccaggcggaggttatgctcaatcaggatattttttgctgccaaatcaccctcccggtaacgctgaagatataatttttcctcgcctgatgtcaaaggttttaaaaaagtcttcaagtcttcacctcaaaggggatttacttacagcttatgcccgggacaggctttccgtgcttttccaacaaaaagaaacaggggataaaacgtaaaatgtataaatgatcggagaatccgggaatcttacataaatgtttatataaatgtttacacaaatgatacgggatttataggaaggatagcataaaatgccaaaatagatagtaaatatgcacaaaaatagggagataaattctgcaaaattcacgaaaacacaaaataaaataaacaaaatataaaaatactattgaaatatttatctaatcgtttaagatataaacatcgacaggggaagtaaattcccataatgctgttggaggaacagcatggaaatcataatgttaggtagtgtcaaataatctatgaaaaacagagctaaagaaaaaggctcaaatgaaccttgaaaattgcagatatttattccgataagctctccgagggctcagggcgttgccctgagaacctacaagggaccagtcccttgacccattttcgggcattgcccgaatctatcctcgccggaaggcaggaaaagggtgcagttgccccttttctgctggacaggatcatccgggaactttttgtcaacagactttcgcggcatatcctcacagtcggcatagccgtctgttgtggtattccacggttctattgacaaccgttccgctccggtgcagcagtcccgtttttctgtatattcagaatggtctgttgtccaaggaagatcagaagctgccacttgcctggcatgttatccgctccctggagcatgtctacctggttgagtactttatatcccgtatgtttatgtggtcgcaggaagttatagtaagccacccagagagccaggtcatagttggcaccgtcgatgttatcaaatccgttcgtgctgcggtaagaagccttgtacgtgcggttcagccgttcaatcatctgtttgaaagggcggtgttctttagaaacagcatcgtcgttggtaagtccaagaacctgggtaacggtgaaggtaaagtctttaccaaacttttttgcgaattccattgcagcaagaggatatgcactgtaaccgtccgcaacaaatttaaagttttccgggagttttgcaagcccatggaaagccatacgcatggcgaggatgcagggaccaaccccacggttatcggatacctgatagccgagaatggaacgtgtggcggcgttcatgatcagccagacgtaagttttgatgccgcggatcttgatataggtttcatcagcagtgaagacatcccctttctcgtaaggatactggtcgacaaagggcttgatacagatggcagcggttttgcagtagttagcgatctgctggtgggaaatgctgatgttatacaggtcttttaaagcttgtgacgtcttgcgcagggaaagccccagattgacgtgcagtgtcaggcataaggacatgacatgggcattgtgtttgttgaatttaagggaagaggcatttttaggcagggtatttaagcccatgctgaaaaaatccatcgtgaactcacggtagatgtaatggagcttatatttatttttaccataatcctctgcgagatctgccttgtcaacttttttgaggttgtgaaggtagtaaggacattcgggattgacgcatttatggacaatgaagtgtttcctgtcctttttgggaaccagggtgttgccgcaatgaggacatcgcagctttacggaagagaacctgctttcatcaggagaaaatctggcatcacagattttacacaggagttgtcctttggaaccgttattccggtagaggaagggtttgggagcatcacagcgtgggcaggtgcaggaatctggaatgtcacactctgaccggcggctgatcgggcggatctttttaccataacgcttttcgtagtaagggatgagttctttgtaagtccagtcctgacggaaatccgtgatcagagggagtgaatcaatcttgaacttttgatatttgggagagtgggaatcatcgaaggcccactgcttgagagggatatatctgcagataaaatttaaaagccagcagatttgttgatgttggtattgaattagctgaagtaaataaagtataatgttcatgagcattggctcctttcggggatgttggtttggcgattgacattataccagaaaagggaggtcaatgctctttttatttgtaaacctcctgtaattcaaggttttaaaggattttagaacaataaaaacagatagtttttgacactacctaatgttaggtagtgtcaaataatctatgaaaaacagagctaaagaaaaagactcaaatgaaccttgaaaattgcagatatttattccgataagctctccgagggctcagggcgttgccctgagaacctacaagggaccagtcccttgacccattttcgggcattgcccgaatctatcctcgccggaaggcaggaaaagggtgcagttgccccttttctgctggacaggatcatccgggaactttttgtcaacagactttcgcggcatatcctcacagtcggcatagccgtctgttgtggtattccacggttctattgacaaccgttccgctccggtgcagcagtcccgtttttctgtatattcagaatggtctgttgtccaaggaagatcagaagctgccacttgcctggcatgttatccgctccctggagcatgtctacctggttgagtactttatatcccgtatgtttatgtggtcgcaggaagttatagtaagccacccagagagccaggtcatagttggcaccgtcgatgttatcaaatccgttcgtgctgcggtaagaagccttgtacgtgcggttcagccgttcaatcatctgtttgaaagggcggtgttctttagaaacagcatcgtcgttggtaagtccaagaacctgggtaacggtgaaggtaaagtctttaccaaacttttttgcgaattccattgcagcaagaggatatgcactgtaaccgtccgcaacaaatttaaagttttccgggagttttgcaagcccatggaaagccatacgcatggcgaggatgcagggaccaaccccacggttatcggatacctgatagccgagaatggaacgtgtggcggcgttcatgatcagccagacgtaagttttgatgccgcggatcttgatataggtttcatcagcagtgaagacatcccctttctcgtaaggatactggtcgacaaagggcttgatacagatggcagcggttttgcagtagttagcgatctgctggtgggaaatgctgatgttatacaggtcttttaaagcctgtgacgtcttgcgcagggaaagccccagattgacgtgcagtgtcaggcataaggacatgacatgggcattgtgtttgttgaatttaagggaagaggcatttttaggcagggtatttaagcccatgctgaaaaaatccatcgtgaactcacggtagatgtaatggagcttatatttatttttaccataatcctctgcgagatctgccttgtcaacttttttgaggttgtgaaggtagtaaggacattcgggattgacgcatttatggacaatgaagtgtttcctgtcctttttgggaaccagggtgttgccgcaatgaggacatcgcagctttacggaagagaacctgctttcatcaggagaaaatctggcatcacagattttacacaggagttgtcctttggaaccgttattccggtagaggaagggtttgggagcatcacagcgtgggcaggtgcaggaatctggaatgtcacactctgaccggcggctgatcgggcggatctttttaccataacgcttttcgtagtaagggatgagttctttgtaagtccagtcctgacggaaatccgtgatcagagggagtgaatcaatcttgaacttttgatatttgggagagtgggaatcatcgaaggcccactgcttgagagggatatatctgcagataaaatttaaaagccagcagatttgttgatgttggtattgaattagctgaagtaaataaagtataatgttcatgagcattggctcctttcggggatgttggtttggcgattgacattataccagaaaagggaggtcaatgctctttttatttgtaaacctcctgtaattcaaggttttaaaggattttagaacaataaaaacaggtagtttttgacactacctaatgttatcaggagggtaaaaaaatgagaaaaagattactgagtgtattactgggagcagcgatgacagttacggcgatgggcggagttacagtaatggcggccgaaaatgaagaaccgcttccgggcggcggctccaatattatttatgtgatcacaccatctgtatccaatccagcatttaaaacagaggctgacgtggctacaaaaacagcggaagagcttggatatgaagtgaaagcagcatcccatgacgacgatcctacaaaacagacagagctttttgacagcgctatcgctgacaaagcagcagcgatcatctgcgataatgcaggtgcggacgctaccattgaagctgttaaaaaggcaaaagacgcgggaatccccaccttccttattgaccgtgagatcaacgaagacggcgtagcgatttcccagattgtagcaaataactaccagggagcaaaggccattgcggaagtatgggtagaagcaatgggtgaggaaggaaaatatgcagagcttcttggaaaagaatctgatacaaacgcaggtgtccgttcttctgctttccatgaagtgatcgaccagtatccggatctggaaatggttgcacagcagactgcgaactgggaaaagacagaagcctttgacaagacagaagcaattctccaggcaaatcctgagctggacggaattatctgcggaaacgacacaatgctggaaggagcagttgcggcatgtgaggcagcaggcaaaaatattccggttatcggtgttgacggctctgatgaggcagcagctcttattaaagacggaaaagctaccggcacagcgcttcagcagttcgctctgatggctgaaatggcagtagagcaggcagacgcttatctgaaagacggaacaacaggtcttgatgaaaaacagcttgttgactgtattgcgatcacagcagacaacgtagacaacctgaaaacatttgtttatacggaaggcggagccgaggcagcagaagccgagacagaagatgccggtgcagaagaaacaacagagggagctgctgaataagccgctgttctaaacgtaaattcagtatgacgggggcgttgcaaaaccagcgggtatgtgattttgcagccccccattttcggtaaagaaacagtcaaaggagagcagttatgagaaaacgtatgttagcggcagggcttgtggcggtaatgatgacaacttgtatgaccggatgtgtaaaggtggtaaaaatcggtcaggaagcagagcttacaggggaacaggaatttaatgcagtagataatgtggcggcgatctgggaatcagaagcgctgccggaacttcaggagaaagcagtggagctttcagagtttctgacagaagcgaacggagatctgaaatctcttgttgataaatatggaaaatattctatgggaaccagcggcgagatcaattatgttgtaaaaggaacaggtacggttgaggaagtaaatcaggagaaaaaagctggatatatgacagtaaagcttgacggctacgatggtccggaggaaatctccattcagatcggttctgtatataaggggtcatctgtccgtgattctctggatgtgattaaattcggtgattatacaaatcagcaggactgggcggcagtttcccagagtatcaatgaaatgattgacgaagaaatagtgaaaaaagcggatccggcatctctgaaaggcaaaaccatttcatttacaggatgctttactgcaaatgacaatacaaaggtactgattacacccatagaactggaagcaaaataggagggtcagatatggcttataaatgtccggagcatgtgtttttgcatgcggatcatatcagtaaaatttatcccggtacaaaagcgctggatgacgtatcctttgaccttctcaaaggcaaggtgaatgttctgatcggtgaaaatggcgccggaaaatccacactgatgaaaatgatagcaggtatcgagcaccccagtgaaggaacgctttatattggtgatcaggaggttgcgtttaaagatactacagatgccagaaagcatggaatcggtattattcatcaggaattaagtctgtttcccaatctgaatgtgtatcagaatatttttatggcaagggagcagacagtaggaaagatcaggcttgataacaaaactcatatagaaaagacaaaaaatattctgaaaagactggagcatgaaattgatccggagacccttgtaggagaactgagagtaggccagcagcagatgattgaaatagcaagaaatcttgtggctgatgatctgaaggttctgatcatggacgagcctacctcatccctcagccagcaggaagtacaggttctttttaagatcatgcgggagctgacagcccagggtatttctattgtttacatatctcaccgtctggaagagatcatgcagatcggcgatcatgttaccattctccgtgacggaaaatatgtttcagatgcagatgtaaaggatattgatgttccgtggatcgtccatgagatgacaggaggagcaaaggcatatccgaagcgtgaaacaaaagtggactggtcaaaagcggaaaaggttcttgaggtaaaaaatctctgccttccaaaagccggaggcggctatctggtggatcatgtgagctttgacctgaaaaaaggcgagatccttggaatttacggactgatgggagccggaagaagtgagatttttgaatgtctgatgggacttcatccggagcatacaggcgaggtatatctggaaggagaaaagctgaacatcaagtccatttcagggcagatagacaaaggctttgcccttattcctgaagaccgtcaggctcagggactggtccagacaatggatattgaaaaaaactgttctctgtctgcaatgaagacgtacaaaaaagcaggggtattccttgattcatccaaagaagggcagaaagtggatgaacagatcaaggatatccatattaaagtggctgacaaacatcttccgatcctttctctttcaggaggaaatcagcagaaggttgttatcggaaaaggcatcctgacagaaccaaagattcttctcatggatgaaccaagccgtggaattgatatcggagccaaaacagaggtgtttgatatcatcaatcagtatgcgaagaggggactttccattattgttgtttcctcggagcttcaggagatcgtttccattgcggaccgtgttctggttctttcaaacggactgaaaacaggtgagttcagcggagacgagatcaaagaagataccctggtactggcgtcctataagggacatcatgtacagaatcatgaaaaggagaattaggatatggcagcagataaaaaaacatcaaataatgcgttaatgatgacccttttaaagggacggactttcatcgttctgatcgtgttgctgatttttttcagcattacagcaaataatttcctgacagtaggttctcttctgacagtggcaaagcatgtggccctttacggaatccttgctattggtatgacctatgtaatcatcactggcggaattgacctgtccgtaggttctgtggccggtctggcaggaatgatcgccggcgggctgatccaggaaggtcttactctgaaatttgcaggcgtgactgtgtatttcagcgtacctcttgtagttctgatcactattcttatgggtgcgctggtgggtgctttaaacggtgtggtaattacaaaatttaatgtagcgccgtttattgccacacttggttctatgtatatctgcagaggtctggcaaatatccgttccaacggggcaaccttttcagagcttgctggtcatgaaggacttggcaatacaggatttgaattttttggaagaaactttatgggaaccatgattcctgtaggtgttatcattcttgctattgtagctgtgatcgcaggactgatcctgaagaaaacacctttcggatggcatgtgcaggcaatcggaggaaatgaaaaggcttccaagctttccggaatcaaggttgaccgtgtgaaaatctgggtttatgctttttccggactgtgctcagctattgtaggtattatcgcaacttcccagcttgtttccgcaactccgaaaacaggtgagtcctgggagatgaatgcaattgcggcatctgttcttggtggtacttccatggcaggcggcgtgggcagtattggcggaaccattgtaggcgcgtttgttattggtgtgatcaacgatggtatgaccatgtgtggtgtaactgaattctggcagaagatcattcgtggtctggtaattattgtagcggttatcattgaccagttccagagaaatcttcaggcaaaaatggcgcttcaggcacgcaacgaaaacaaataaaacatatttggtcccggtgtgagtgcataccgggatcttttgactaaaaaaatgtatgggaggtggttttttatgaaaaaaagaggtattatcaatgcacagcttgcagggctgatcgcaggacttggacacaaggatacttttatgatcggggacggaggaatgccaataccaaagggcgtggagattgtagatctggcgctgtgcggcggcgtgccaacttttcgccaggtaatggatgcggttcttgacgaggcggaaatcgaaagttatactatagcaaaggagattgtggagaagaatccggagcttctgacttatatcagagaaaagcttccggaagcggaggaggaaatgatcctgcatacagagctgaaggaaagatcagcccgggtgaagtttgccgtccggacaggggaatttactccatatcccaatattattctgagagcgggtgttgcatttcctgcataaaaaggagggcatatttatgaaggttctgaattttgggtctttaaatcttgattatgtgtatcaggtagagtctattctgattcccggagagactcaggcatcaaaagacaggaagacattttgcggcggtaagggactgaaccagtccattgcgctggcaaaagccggtattcctgtgtttcatgcgggaatgattggagaagaaggggatattcttctggaaacctgcagagaaaacggagtaaatacagactttatcagaaaaattcaggggcccggcggccatactgtgatccaggtggacaaaaacggtcagaactgtattcttctttttggcggatccaacagaagtattaccagagagtttgtggatgaggttctttctgcctttgaaaaaggagatatacttcttctgcagaatgagatcaacgaactggattatattattgaccaggcttatgaaaaggggatgatgatcatcctgaatccgtctccgtatgataaggcgctggagacatgtgatttaaaaaaaataagtctgtttcttgtaaatgagatcgagggatttcagattacaggggaaaaagaaccggagaagattctggcaaagatcagggagctttatccgaaagctgcaatcgtgctgactctgggaggagacggatctgtttatcaggatgaaacaggtatttaccgtcagggaatctataaggtaaaggctgtagatactactgcggcaggagatacgtttacaggatattttatttcatccattatcaatggaatgccggttcaggagggactccggcttgcggcaaaggcgtccgcgatcgctgtttccagaccgggtgcgactgcgtcgattcctctgagagaagaggtgcttaacagcagtctgtaaaaattacaagaggaaggtgtctgtatgaaggtgagtattcgtgatctgagcaaaatgaccggtttttctccggcaactatttcaaatgctctgaaccacaaaaaaggagtcaataaggatacggcagaggaaatattcagaatagcacgcgagacaggatatttaagcaccaatgccgtcacaaagatccgtctggtgatctttaagaaaaatggccggatcatcgaggatactccgttctttcagagcctgatcgagggatttgaggaagagtgcagaagacttggatatgaaatggtggtttccagagcagatcagaggaatccggaatatctgaatcaggtaagagaaatgttaagcgagcagggcgcggcggttgtggtgcttgcaacagaaatgatggacggcgatctggagccctacagaaatgcgccctgtcctctggtgattctggactactggacagaatctatggagtttaatgcggttcttattaataatgcggatgctgcaagaatgatgacagagcatcttctggacaatgggcataaagaggtgggatatctcaggggttctttccgcataaagggcttccgttccaggttcgtgggctttcagactgctttaaaaaagcggaaggttccttataaagaggaatatacagtaactcttggaacctctctgaacagcgcctatcaggatatgctggagtatctgaaaacttctccgaagcttcctacagcgttttttgcagataatgacatgattgctctgggcgctatgaaagctctgagagaaatggggtacaggataccggaggacgtatctgtggcgggatttgatgatctgccgttcagtgagatttccacgcctgccctgacaactcttcgggttccaaacagagagatggggaaaatggctgtacgccgcatttccgagatgatagaggggatagggacagatgcagtaataaaaactcaggtatgtccgaaaatcgtgtatcgtaatacagtgaaaaaactataaaataagtaaaaaatgtatcccggatatctggattgtttgattcagatatccgggtacttttttgcggaaaattctgtgatttcgtgtgtgggaattctgaaaatacatatgtgcctgtttatatttgtttatataaatgtttatataacaattgccgaaaaatatgatttaaacagaaaaatataggcgatataaacaaaaaatacggtaataaattgtgcaaaatcctgttttataaacataatcataatattttattgaaaaataatataaaatatttataataatgtttatagaaagttcaaagaacgtaaatgaggatatattgaaggaggaatcacaatggatcatattaaattaggatacgcgcctacaagaagaagtattttcagcgcgccggatgcggttaaatatcggggacttactgctgaccgtctgagagaactgggcgttgattttgtagatatcacagatattaatgaggaaggtcttctctataatgatgcagatatgaaaaaaattgctgaaaagtttaaggctgaaaaaattgacggactgtttcttccccactgtaattttggtacagaatatgaatgtgcccgtctggcaaaggagctgaatgttccggttcttctgtgggggcctcttgacgagcgtccggatgaaaacggagtgcggcttcgtgatacacagtgcggactttttgctaccggaaaggttctgagacgcttccgtattccgtttacctacatgacaaactgccgcctgaatgatccggtatttgaacgcgggatccgggattttatggctgtatgcaatgtggtaaagaaattcaaaaatatgaggatccttcagatttccacaagaccttttgatttctggacaaccatgtgcaatgagggagaacttctggaaaaattcaatatccagctttctccgattcccatgcccgagcttacagatgaagtgaaaaaagtaaaaaaagagggaacagaggttgcaaaagtaattgactactgccgcagcaatatgattgttgagatcaaggatgaagaactggaaaatgtagctgctctgaaggttgccatgaaaaatctgatcacaaaatacggatgtcaggcaggggcaatccagtgctggaaccagctgcagagtgagcttggaatcatgccctgtgccgcaaatgccctgctgaatgaagaaggaattccggttgtatgtgagacggatatccatggagcgatcactgctcttatggtagaggctgcaggaatgggagaaacaagaagcttctttgcagactggaccatccgtcatccggatattaaaaacggtgagctgcttcagcactgcggaccgtggccgatctcagttgccggagaaactccgaagattacatatccgctggcttttgaccatccgggtgcaatcactgcagaggcaaagcacggagacattactctggcgcggtttgacggtgataatggagaatattctctgcttctcggaaatgcaaaaggtgtggacggtccaaaaggaatgggaacctatctgtgggttgaggtggataacatcaaacgtctggaagcgaagatcgtagagggtccatacattcaccactgtgtgggcatccacaaagacgttgttccggtgctgtatgaagcatgtaaatatattggaatcaaaccggatctctacgaccccattgaagaggatgtaaaagcatatcttcgcggcgaatgaagaaccggaaagagaggatggaaattatggaaaatctgactgctttgtcatatgagcttcgcaaagacgtgatcaatatgattcgttccggaaaggccggacatatcggcggagatatgagtgtgatcgacacacttgtaacactttattttaaacagatgaatatcggccctgaaaatatggatgatcctgaccgcgaccgttttgtaatgagcaaaggacattctgtggaggctctttacgctgtgcttgcagagaaaggctttttcccaatagaggaggttattgataccttcagcaaatttggctctaaatttatcgggcatcccaataataagcttccgggaatagaaatgaattcgggatctctgggacatgggcttccggtatgtgtgggaatggctcttgccggaaaaatgaatcatcagaattaccgtgtttatacagtaatgggcgacggagagctggcagagggctctgtgtgggaaggcgcaatgtctgcagctcattataagctggataatctctgtgcagtagttgacaggaaccgcctgcagatttcaggaaatactgaagatgtgatgcatcatgatgatcttcatgaaaggttcagaagctttggctggcatgtaattgacgtgaaaaacggaaacagcattgaagaactggatgcggcctttgaggaagcgaaaacagtaaaaggaaaaccgacggtactgatcgccaatacagtaaagggctgcggctcctctgtaatggagaacaaggcatcctggcatcatcatgtgccaggtgatgaagagtatgagcagatcatgaaggatctggaggagagaaaggaggctgcgctgaaatgagtaagatcgccaataaacagatgatttgtgaggttttgatggatgcggcaaaaacagacagggatattgttgctctgtgcagtgattccagaggcagcggttcctttactccttttgcagatacttatccggaacagtttgtggaaacaggaattgcagagcagaatctggtaagcattgctgcaggactggcaaagtgcggcaaaaaagcatatgcagtttctccggcctgctttctttccacaagaagctatgagcaggcaaaggtggacgttgcttattccaacacaaatgtgaagctgatcggtatcagcggaggcgtcagctacggagcgctgggaatgagccatcattctgctcaggatattgcggctatggctgcgattccgaatatgcgggtatatattcccagcgaccatcttcagacaagggagctggtaaaggctcttctgaaggacgaaaaaccggcttatgtgcgtgtggggagaaatgcagtagagcctgtttatgaagaagaacatgttccttttgaaatggataaggcaacggttgtatgcgaaggaactgatattgcaatcattgcatgcggagaaatggtaaagccggcaaaggatgcggcagaacttttaaatgctcagggaatcagcgcttctgtaattgacatgtactgcgtaaaacccctggatgctgaagcggttgtaaaggctgcagaaaacgcaaaagcagtgctgacagtagaagaacacgctccctatggtgggctgggatccatggtaagtcagatagtaggaagccggtgcccgaaaaaggtggtgaatctttcccttccggatgctccggtgatcacgggaacttcaaaggaagtatttgattattatggcctgaatgcagaaggaattgcagaaaaggcagcggagctggtgaaatagtatgaacagatatgtattgggaattgaccagagtacacagggaacaaaaggactgctgtttgatgaaaacggtgctcttatctgccgaagtgatctccctcacaggcagtatattgatcagcggggctgggtggagcatgacccggaggaaatttatgcaaatacagttcaggtagtaaaaaaacttgtggaaaaatcaggaattgacaaaaatgatataaaagttcttggtatcagcaatcagcgggaaactgcccttgtgtgggacaggaataccggaaagcctgtatataatgcagttgtgtggcagtgtgccagaggcgcaaagatctgtgaaagaattgcagaacagggacatggagaaatgatacgctcccataccggcctgcagctttcaccttacttttcggccgcaaagatcgcgtgggtacttgaaaatgtggaaggagctgcggaaaaggctgagaaaggagaactctgctgcggaaccattgacagctggcttgtttataagctgaccggaggaaaagaattccgtacagattattccaatgcttccagaactcagctgtttcatatcggaagtctttcctgggatcaggaggtatgcagcttattcggtattccggtatcctgtcttgcggaagtgacggattcagacggagaatacggatatacggattttgagggatattttgaaaatcccattcccatacggggagttctgggggattctcacggcgctttgttcggacagggatgtacagataagggaatgatcaaaactacttacggcacaggatcttctattatgatgaacattgggcagaagcctgtatacagcgaccgggtggtaacttctctggcgtggaaaatgaacggccaggtaaattatgttctggagggaaacatcaattatacaggagctgtcattacctggctgaaggatgagctgaaactgatctcttcaccttcagagacagagatactggccaataaagccaatccaggtgatcgttcctatctggtgcctgcgttcagcggccttggggcgccctactgggacagtgaagcatccggaatcctgacaggaatcacaaggacgaccggaagagctgagatcgtgagagcaggtctggaatccattgcctatcagattacagatgtggtaaatgccatgagcgaagaatccgggattaagattcaggagctgcgggtggacggcggacctacaagaaacaaatatctgatgcagtttcagagtgatattgcagatgtgactgttcaggtgccctcagcggaagagctttccggaatcggagccgcctatgcggcagggattgcagcaggaatttttgaccgggaaaaagtattctcccagatgacccggacaaaattttctccggaaatggagccggaagtgcgaaatgaaaaataccatggctggaaaaaggccgtgaaacaggttctgacataatttatccattattcacggaacaatatctgaactgataactgtaccatgaaactgaaattgaaccatgcagtcataacatcgatcaatcaacccgtcaaaaggggatgtgagtggctggtaaaataagacaaataatttttaacaaaattgagtattgattgtcggggttcaatagcgaatatagagaaaaatataaagaagaacataaaatatcttgaccattatatagactcaagttataatcctctatataaaatttttcgtgtgaagagcagacaatggggtctggaaaatcccattgtctgctcttttttgttttgtgtattttgaattttgaggcataaatatgcagaaaacagcgaaaaatataataatctgtacaattcgagaggaggaatattatgaggctgaatcaaaaagaacaggaaaaactaatgcttcatatggcaggaaaccttgccaaagagagaaaggaaagaggtcttaaactaaattatgtagaggcgctggcgtatattagttctgaactcttagaacttgcaagagatggaaaaaccgtagtagagctgatgcagcttggcacgaagattcttacaaaagatgacgtaatggacggagtcgttgatatgattgatgaaatccaggtagaagcgacatttccagatggaaccaagcttgtgacagtacataatccaattcagtaaggaggagataaggtatgaaaattggtgaaattatgcctgtggatcgtgacattatacttaataaaggcaaaaaaacagtggcagtaacagtggcaaacaaaggcgacagaccagttcaggtaggttctcattttcatttttttgaggtaaataaatgcctttcctttgacagggaaaaatcttatggatatcatctggacattccgtcaggaacctctgtaagatttgagccaggtgaagaaaaggaggttcagcttacggagatgggcggcagacagagagtatttggcctgaatgatcttacctgtgcgcgggcagcagacgacacgaaggcagcatccatggaaaatgcaaaacgaaaaggatttctatagggagggacaacgatgagcacaaaaatttctggaagcaaatatgcggcaatgtatggtccgactacgggagataaggtacgtctggcagatacaaaccttgtgatagaggttgagaaagattatacaacttatggagacgaagtgaaatttggaggaggcaagaccattcgtgacggcatgggacagtctgtaaaaacctgcagtaaagatggggatctggatctggtaattaccaatgcattaatcgtagattctacagggattgtcaaagcggatataggtatcaaggacggcaggatcgcaggaataggaaaagcaggaaatccggatactatggacggcgtcacaccagggatgacggtcggagcctctacagaagcgcttgcaggcgaagggatgatcttaactgcaggtggaatcgatactcatatacattttatcagcccacagcagatagactgtgcgctgtacagcggtgtcactacaatgatcggaggcggaacaggccctgcagatggcacaaatgcgactacctgtacgcctgggccatggaatttaagaatgatgttaaaggctgctgaagaatatccaatgaaccttggtttccttggaaagggaaactgttcagacgaggcgccccttattgagcaggtaaaagccggcgccatgggtctgaagatccatgaggactggggggcaacacctgcagttattgatcattgcctgaatgtagcagatgaatacgatgtacaggttgccattcatacagatacattgaatgaaggcggatgtgtagaagacacacttgcagctatcggcggcagaaccatccatacatatcatacagaaggggccggcggaggacatgcaccagatattattcgtgcggcggcagctccaaatgtactgccgtcttctacaaacccgacgatgccatatacagtaaataccctggacgagcatctggatatgctgatggtctgccatcatctggataaaagaatcccggaagacgttgcatttgcagattcccgaatccgcccggagacaattgcggcagaggacgttcttcacgatatggggatattcagtatgatgagttctgactcccaggctatgggacgtgtaggcgaggttatcacacgtacctggcagacggcaagcaagatgaaggatgagcggggggcattgccggaagattcaggacacggcaatgacaacttccgtgtaaaacgttatatctccaaatataccatcaatccggctgtcacacatggcatttcacaatatgtaggatctgtggaagaaggtaaacttgcagatcttgttctctggaatcctgcattttttggcgtaaaacctgatatcattatcaagggcggtatgatcattgcatccaaaatgggcgatgcaaatgcatctattccgaccacgcagccagttttttatcagccaatgtttgctgcacacggaaaagccaaaaacgaaacctgccttacatttgtatctcaggcagctgtggatgaaaatgtaaaagagaaatatggacttgagaaaacagtagtgcctgtaaaagggtgcagaaatatcagtaaaaaagatatggtgcttaatgacagaacaccggagctgacagtggatccagagacatataaggttacggttgacggggaagaaatcacttccagaccggcagaaaaacttccgctgacacagctttacagtttgttttaagatgggcaggagaggagagcgttattatgttaggagtttgtcttttatttgtaggcattgtattaatcaataatggtatgtgttctttatacaatgtagatggaaaatccacagccatcatgaatatttttacaggcggcctgtccctgcttatcaactttgttaatttggtacagggtaattattatgcagcgggaacgggattactgttctgctttacctacctttttgtggctctggggaaatttctgaaagcaagtccgattccttttgcatggttttctacttttgtagcagtcaatgcggtgatctttgggactatcgagggggttacaggaagcagtgcgctgggtatcgcaccggatctgcgatgggcagcaatctggtatctttgggcgattctctggggaactgcctttgtggaggacatctgtggaaagaagcttggaaaatttgttccatatcttcaggtgtttgaaggcattgtaacagcatggattcctggagttatgatgcttctgcagatctggtaaaaataaaccgataagaaagatttatcggatattggaggttgaagataatgctgtgtgaacaggtttcaggaaagctccatgactttgatactacaggaaaaacattagaatttgtagatattgaatggcatgaagctttcaaaaaaatacataagaaaacaacagataaaggaacagaagtgggaattcgtatggacgattctgttctcgcccgaggtctgtatcaggatgatgtgatttatgcagatgagacaaaactcgtagtgataaatactccgccatgtgaagttatacgggtatcttttgaaccaggacacgagaaaatggccgcaaaagtctgctatgagattggaaacagacatgcgccgcttttctggggagaaaatgccacatttattactgtctataacgaaccaatgcttgctatgcttcagaaaattcatggtgttaaggcaaaaaaagaaatattgaagctggattttgatcagaggatttctgcaagtattcacaatcatcatcattaaggaaagcggatggagaatttatatgtcagaaaaacagttttaccttttgcaggtaaatgatgcattgtttcctattggaggatattcccattcacagggattagagacttatattcagcgtggaattgtccgcgatatagatacagccagagaatatatcctccacaaaatcaagtggaatcttgcatatacagaacttctgtcagccagacttgcatatgaagccgcagagggaaaagatcttcagaaacttctgcatctggaagaaattctggaagcatcaagaatcccaatggaacagagggaagcagccagaaaaatgggttcacgttttgccaaaactattgaaaagcttggattgaatatcaataaaaatgggattttcaggaaatatctggatgcgagaaaaggaaaagcagtgaaccacagctgcatctacggagtcttctgtgcagagatggagattgcattgaacgaggcaatgactcattatctctatgcccagacatctgcaattgttactaactgcgtaaaaacgattccccttagtcagacatccggacagcagcttttgagcggatgctacgtggaatttgatgatattttaacagatgtcatgaacagaagggaagatgatttatgcctttccgcacctggatttgatctcagaggaatccagcatgaaaagctgtattccagactgtatatgtcatagtttagtcatgtcagaaagctctgggagcaacagattaaaaaatgctgtcaacaagtaaatcagaaaagaggagattagtatgtcatatgtaaaagtcggagttgccggaccggtaggttcgggaaaaacagcgcttattgaggctttgtcaagaaagatggcagaggactacagcattggagttattacaaacgatatttatacaaaagaagatgcccagtttcttgcaaagaacagtgttcttccggtagaaaggatcattggtgtggaaaccggaggatgcccgcatacagccatccgtgaagacgcttctatgaacctggaagcggtagacgaactgacagaacgcttcccggatattgaacttcttttcattgaaagcggcggggataatctgtctgcaacgttcagtccggaacttgtagatgcgacgatcttcgttatcgatgtggcagaaggagataaaatcccgcgtaaaggcggtcctggaatcacacgttctgacctccttgtgatcaataaaatcgatcttgcgccctatgtgggcgcaaaccttgaaataatgaggagggattctgaaaaaatgcgcggtgacagaccatttctgtttactaacatccgtgaaggcgaaaatgtggataaagtagtagagtggatcagaaaaaatgtacttttagaaggaatgtaaaagaatatgcatatggataataaattcggaaaaatatcccgtatcagtgcctgtgcagctttaaaagatggaaagactattctggaggagctgtcttttacagctccatataaaatcatgatgccttttgagagagagaacggcggcatccagatcatgcctctctgtgcctccgccggaatcatggcaggtgattctcagaattttttttaccatgtaaaagaaggggcagacctggaagtactgtcacagtcctttgaaaaaattcataaaatggacgaaggagcagcatcccggactattgaagtacaggtggataaaaatgccacactgtattattatccccagccggttattccattcgcacagtcatcctttgacagcagaatgacgattcatctggaagacgaaacctcctgcctgtttctgctggaaattatttcctgtggccgaaaagcacataatgaatgttttcggtacagcagattttcctcaaaagtccttctgtacagaaatgataaactgatttaccgcgacaacacctgctacgagcctgacagaatgccgatggaagggataggcatgtatgaggggtacacacatgtggcgaatatctttttgactaaacttagagatacggcagccaatttgcagcttcaggaaaaaatctggcagattcttgatgaagcttcagaaacagagggcggcatcacacggcttacaacaggagatatggcactgaggatatttggacaatgtgctcagaaactgcagcagacagcagagaagattaaaaaattgtatgagcatgaacaaaaacagaatatgggagcagccgattatggctccgacagtggaatataaatccggtcaatatctgtatcacaaaaaacaatatgtgaatgttttttgtgatacatttttttgaattttttgtgtttacagaagtgcattctgatggattaaagctgaactgcctgcgaaaagcgctggcgaagcggctggcatacctgaccttgtccattgaacagcaatagtgcaaaaaatgacaggcgcaggagagtttgatactttcttgcgcctgttcccatagtagtgtataatagaaatcgagttgaaaaagtaaagcgagtattcattttacgcgagatataaaaacgcatcatagataaaaggaaaaaaaggtgaaccatattgaagagaaagattgaacaattactgagtggaaaattcagatacgggcagccgcctcttcttttttctcaggaacggctggagatttccctggaggcaggcaagactgtcaggggagaactctatcttggaacagaggaaaacgaaaagatccagggctatgtgacgtcgtccagccgcagatttgttcccggaagcagcaggttttccggtacaacagtctgcataccttatggagtggacggaacaggaatgaagcccggagatcagtgcagcggatggctgtgtattacctccagtgcaggagaatacaaaattccttttgaaatccatgcggaaaaggacagcttcagaaatacacagaaagaaataaaaaatatggaagccttccgggaaatcgcaaaaaaagatttccgggaggcatatcgcctttttaatgataaatgttttccggagatgatggaaaaggcagacaacagacaaaaagctctttatgcagggctttctcatcagcctgtcacctatcagaatctggaagaattttttgtgggcttaaaggaaaaggaaccggtatctgtttccctgaaaacagtcagaaatgaattttatgagataagggaatcagtacaggaatcctttgatatacaaaaaagcggctgggggcatctgcgtctggatatagagcctcatggcgattttctggaagtggagcgccgggtgatcacccaggaagaatttatcggaagcacctgccgtattgaatatgtgatccatgcggacaggctgaaagacggaaatcagacaggcaggatcattgtgagaagcccgtatcagaagctggtctatgagatcatggcgtccagagggccaaggatcagggcagatgtaaaggcggaagaaaaaaaacacagagcttccatggtaaaagactatctggagtaccgggaaggcataatggactttaagacctggatcggaagcacccgttttattctgaaccagctccgtgcttccggctgtgattatccggaatatcagatgtatgaggcgtatatctgtcatctggaaggacgggatgaggaagcgtcagaaatccttaaaaagtatcagaataaggaattttcaggagatgaactggagcttgccggcgtttatctttatctctgtactcttacagggctttacaaagacaaggctcaggcagtatggcggatccagaatcttcatatgcagaaagcggacagtttccagctgctatggattcttcttcagatggacggcggctataaaaatcttccctcagagggaatctttatgatggaagaacagtttgaaagaggctgcacaagtcctcttctttatatggaagcctggaagtggatcagcgaggatatcacactttttcacaggctcagtccgttctggatccaggtgttctgctttgcgggaaaaagaggcctgcttacagaagagctggttatgcgtatggcttatctgtccggatatgagaagaatttttccggaagtctgtatcaggctcttgtggcaggctatgaaaaatttccttccgaggatgttctggaagcagtgtgcaaatatgtgatgaagggaaatccccacaagccggaatatttccgctggttttctctggcagtccagcaggggctgcggcttacaaggctgtatgaatattatgtggagactatggatatctcctatcagagagagctgcccaagcctcttctgatgtattttaactacaatgacaatacccttggcgacagccggaaggcctttgtctatgcaagtgtgatcacctgcaaagagaaggagccccaggtttatgaaagctaccgggatactatggaaaaatttgcccgggcaaaaattgcagaagggcatatggacgaaaactatgcggttgtctatcaggaatttctgctggatccacagaccggagaagaggcggagctggctgccggaaagctttttacctaccgcctttactgtgatgacaaaaaaatccgcagagtgatcgtctgccatagtcagatgaaaaaggaagaggtttatccatgcatacagggagtggcatatccgaggatttatacagatgatgctgtgatcctgtttgaagatgaaaatcagagacggtatatgtcaaccgtacattataatctgaaaaagcttacagacgacagtcaggctgctgcgaaattcctgaagctgggagcatgggatccgggagttcttctttattattgtgaaaaggaaaaaatgtgtgcagagaatctggaatattttcagaaactgtcagagtctcctgcatgtacagatgagtacagaaaaagcataagaaaacagctccttgactattattcagaacatattcagggggaagatctggacaggtatctgcatgaaatggattactgggaatatgcagaagtagactgtgcaaagcttctggaaatactgatttccagaagaatgttccggcaggctatggggcttgtggaggaatttggttatgaaggtctggagcttggcagtcttctcaagcttacaagccggatgatattgaaagcagatatggcagaggatgatgagctgctttctctggcgtccgaggtgtaccgacgggggaaatatgatgaggtaatccttcattatctgatgctttaccgcttcgggccggttgacgagcttctttccatatggaaaagcgcaaaaggctttgagatggacacctatgatctggaagaaagaatcctttctcttctgatgtttacatctgattaccgcaaagagggagaaagagttctggaatcttatgtgaagcagtcaggcaaagagcggatcacaggggcttatcttactcaggtggcttatgggatttttgtaaaggaataccctatgacacggtttatcagacagcgtctggaatatgcatgggaaaaccactggccggtgaacaggatatgcagacttgcgcttttgatggacatttcaaaagaaaagcacatgaaaactaggcaccgcaaaatagcagaggaaattctggaagaatgtgccagagatcagctggtatttggatttttcaggaggctgcctgcggagcttctcggcctgtggcagttagatgacaagacttttgtggaatgtcatgctcatccggaggcgaaggtaactcttcgctacgctctggatgccggacttggaggggaacgggaatataaaagcgaaccgttaaaagaaatgtatgagggtatttttacaaaaacatttacactgttttacggggaaaccctgcattattacttccatattgaaagaaacggagaggtaagggaaactgtagagcgaaccgttaccatgaaaaagatagaaggaattccgggcagcaaatatcagcttctgaatcagcttctgtctgcaagaaggcttggaaaaaaacatgaggttgaaaaaggactgaagcgttatctgcgtcaggaacagtatgtgaaagaaatgtttgccatagaaaaggaacaggaaaaatgaatgaaacacgggatttgatcattggtattgattttggaaaaaaatattcacagatctgttactatgaccggaaggcggaggaggcgcgttccctgcctgtaaaggtgggaagcagtctctatgaaactcccacctgtctgtgcaggaggacggacacagatcaggaagaatactgtattggcctggaagcggaatattttgccagagaaaaaggcggatttctgctggaggatctttatgcagtgtccatgagccgggaaaaagttcatgtggccggcgaggatagagaaccctgggagattctggggctttttctcagaggaatgctgaaatttccgggagtcatggaagtggaaaaaaatataaaatctctgaccgttaccatggagaccatggattcgatccaggtggagaatcttcagaaggcagcagaatttctgggactttctgaggaccagttcagtcttctggattatgaagagagcttttattattatgtgcttacccagaaggtggaaacctggaacagaagcgtggggtggtacagcttcagcaaggataaggttgtttttcggaagcttgttatgagctcgggaaccagacctgtatttgtaaggctggaaaatcctgtagaagcaaagctgagacagcctgcgcaggaaagagatgaggatttttataaatttgtaaaggaaactcttggtacggatctttattccagtattcagatcaatggcgagggatttgaccaggagtgggctgtgaaatctgttaagctgctttgctatcagaaacgaaaggtgttttttggaaacaatctttttgcggcaggagcctgcggcgcaggcgcggaaaagctgattaataaaaggctgaaaggctatcggtatctgggaagctcccttgtgctcaaagacgtggggatggagatgagggttatgggggcgcctgcctattatcctcttctggaggcaggaaataactggtatgaaagcagagcctgctgccagctgatcctggacaatacagaagaacttgtttttgtggtgggaaccatgggagaaacagaaaaaaagagaatgggaatgcttttgacagggcttcccaagcgccccaataaaacgaccagacttttattaaaacttcagtatatatccagaaaagagtgcaggattacagtaaaggatcttggttttggagaaatgttcccttccagcggaaaagaatgggaagaaatcgtacagtggtaaaggaggagagtcattgagcggatacattttatgtcagacaaaaactgcggattctccgtattttattgagaatatcagcacaaatatctacactctggaagaactgtgttactatctttttcacaatctttatctgattgatgatactgtgatgaatgaaagactgtgtctctggcttcaggatgaactgaatcttccggggcttgccgccaggctgagagcgaatcttggaaaattttccagtctggaggatgttctttatcctgtttttaaggagatcaattatctgacctatgaggagctgaaggttctgaatgccaggatacagaagcttgacagagaatcccgccaggtcagagaaaaacaaaaaggcgacgctctgatggaaaacggtatgtacgttcatgccattcaggtttatcagaagcttcttgaggaaaatgatctggaagaatatggacaggggcttactgcaaaagtatgccacaatctgggctgtgctttcagctaccttttccagatggaaaaggccttggagtatttcagaaaggaatgggaatcgggcggcgaaagacaggctctgaaaacctgccttctggcgctgcacagtgtgcggacagaggaaaagtataaagctcaggccagggaactgggagcagacgatgagcttatgagcgaggtggcagaagttctcagggtttttgcggcaaaaccggggatcacagtggaaaaagaaaaaacagatgctcttctggaaaagtttactggagaatatcacagaggaaccgggtcataactgttttcaggcgccgggaacggagcgagcagtaacgccggggcgtgaatatttgaacaaaacagtagacgaaatgaaatgaatctggtaaactaagattatatttcgggagagacgaatgtctgctcccgcaaaagattaggaggaattatcatgttagtaaacgcgtcagaaatgctgaaaaaagctaaagaaggccattatgcagtaggacagttcaacatcaacaaccttgagtggacaaaggcgatccttttaacagctcaggaaaataactctccggttattcttggtgtttccgaaggtgccggaaaatatatggcaggctataaaactgttgttggtatggtaaaaggaatgatcgaagaactgaacattactgttccggttgctcttcacctggatcacggcagctatgaaggatgtctgaaatgtgtagaggcaggatttacttccattatgtttgacggttctcattatcccatcgaagagaacgttgaaaaaacaaaagagcttgttaaaatcgttgctgagcacggaatgtctcttgaggcagaagttggctctatcggcggcgaggaagacggcgttgtaggtatgggcgagtgcgcagacccgaaagaatgtaagatggttgcagatctgggaatcgatttcctggcagcaggtatcggaaacattcacggaaaatatccggaaaactgggctggattaagctttgagactctggatgcaattcagcagcttacaggagatatgcctctggttcttcacggcggcacaggaatcccggctgacatgatcaaaaaagctattgaccttggcgtatccaagatcaacgtaaatacagagtgccagatctcttttgcagaagctacacgtaaatacatcgaagaaggcaaagatcagcagggcaaaggatttgacccgcgtaaacttcttgctccgggatttgaagcaatcaaggcaactgtaaaagaaaaaatggagcttttcggttctattgacaaagcctgaataaaagtgcgatataaataatttataaaagagctgcggtattgaactggttcagagaagtgctgttcctgtcaggtacggcagctctttttcattgttttaagacatgttttacgacaggaaagattctatgacagaaaagaatgaaatagttttaatgaattttaccggagtttataaggaacaggaattttatagggaagaaaaaatttcctgggtggatgtgcaggggctttccgggtgcaactgctactgtgacggggaagctcaggaaatactggaaaagaaaattgcagatctgccggtaaaaggcattcattttgtggattctgggaactatcattatatgagcctgctctggctgaaaaaagtacacacgccattttgcctgcttgtatttgacaatcacacggacatgcagccgcctgcattcggagggcttctgtcctgcggaggatgggcggcagaggctttaaaggcccttccgtttctgcaggagcttgtgcttgtgggaccggacagagaggcttatgaacagacggaaggagagatcagaaacaaggtccgtttcctttctagggaagatctgcaggagatgacggaacaggaaaagaaaactttttttgaggagatttccgataatcttcccctttatatttctgtagataaggacgtgctccgtcccggagacgccatgactgcatggagccagggagatatgacggcagaggaactggaatcttatatcagggctttgtgcaggcggcaggagcctgcgggaatggacgtatgcggagaatacgatgccgaagaagacggaacctgtaatgacagggtaaacgggatgttgctgaatgtatggaaagactggagggattcccatgaaaaatgagctttttaccattggaccttttactgtgtacagctatggttttatgatcgcagtgggtgtgtttgcggcgtggctgacagcagaataccgggcaaaaaaataccgtgcagatacagaccagatattttttctggtgttgtggtgtctggtgggaggacttctgggcgccaagcttttgttctggatcacagaatggaaagaggttgcagcagatccgggttttattttaaggacaatgacagatggatttattgtttatggaggaattataggaggaattatcgcaggctggctgtacagcaggataacaaaactgaatttcctgaaatattttgaccttatgatcccgtctgtggctctggctcagggatttggaagaatcggctgccttctggcaggctgctgctacggaaaagaaacctccggatggccgtccattacttttcatgattctgatttcgcccctaatggtgtggctctggttcccactcagatttattccagtgtgcttgatttcgtgcatttcgcaatccttctctggattgcccggaacaaaaaggcagacggacaggtagctgcctgctatatgatcttttacagcgcagggcggtttatactggaatttttcagaggagatctgatcagaggaagtgtgggagctctgtccacgtctcagtttatcagtatttttataatggctgcagggcttgctatgctctggtttacaaccgtaaaggccggaagaaaataggtgttcagtttatacttcggacatacagaaaagtaaaactcatatgcagctgcaatttgcagagaataaaaggtgcaggttctttaagcaaaggaacctgtattttttgtcgaaaacttttacttgacaataagggcaaattataatagcatgtacatataaaaacgaacataagtttgcgaaatcaataaagaacagcgataaggagaattgagattatgataaatgaagagaagcagaaggcactggaatccgcgctttcacatattgagaaacagtatggaaagggctctgttatgaaactgggagaatcgggggctcatatgcatgtagagacgattcctaccggctctctggggcttgatattgcccttggagtaggcggcgtgcccaagggacgtattgttgagatctatggaccggaatccagtggtaaaacaaccgttgccctgcatatggttgcagaggttcagaaacgcggcggaattgcgggatttattgatgcggagcatgcgcttgatcctgtttatgcaaaaaatatcggtgtggatatcgacaatctttatatttcgcagccggataacggagaacaggctctggagatcactgagactatggtgcgctccggcgctctggatattgtaatcgtggactctgttgcagccctggttcccaaggcagagatcgagggagagatgggagacagccatgtaggccttcatgcccgtctgatgtcacaggctctccgtaagctgactgctgtgatcagcagatccaactgtgtggttatttttatcaatcagcttcgcgagaaggttggagttatgttcggaaatccggagacaactacaggcggacgcgctctgaagttttatgcatcggtacgtcttgatgtcagaagaggcgaaactctgaagcagagcggagaaatggtgggaaatcatacaaaagtaaaagtagtaaagaataaggttgctccgccgtttaaacaggcagagtttgacattatgttcggaaccggaatctccagagagggagagatcctcgacctggcggcagagtgctcagtggtaaacaaaagtggtgcatggtattcctatcagggagaaaagatcggtcagggacgtgagaatgtaaaggtatttcttaaggaacatccggaaatatgtgaagaaatagaaaaaaaggtaaggatccattaccatcttcttccgggagaagagggagaggcggaagcagcaggcgcagacaaagaaagcacttccccggcagaagctgacgagatctgataagacagtatgatgatggaaattcaggaagaacagagacaggcgcgaaaaaaggccatgaagcttctggaacgtatggaccggacagagaaaggactcagcgaccgtcttttgcaggcaggtttttcagagcaggcggttctggacgcagtatcttatgtaaaaagctatggatatatcaatgacagcagatatgcattgaattatattacatatcgtattcatgaaaaaagccggcagaagatctttcaggagctttatacaaaaggaattgacagggagactgtctctgaagcgtgggagcaggcgtgcagccttgaggaacctgacgagaggatgatactgaggcgcaccatagaaaagcgatgcagtccggtaacagaactggatgagaaggagatgcgccgcctgtacgggtatctggcaaggcggggcttccggccgggagaaatttcctctgttctggaggaaatggaaattagttttcataaaaattatggcaacaaataggtagaaaaacttgacagatttctcaaaaacagataaacttgtattgttgtatttgtacaatgaaaactaaataaggaggtgctcctgtgacaactatcatcataagtgtaattgtcgctgtagtggtcgcactgcttattgcggttcctcttacttgcaagcttgctgtcgaaaataaggcaaaaaaggacgccgaggttgtcggcacagcagaagacagagcaagaagcatcatagatgaagctttaaaaactgctgaaacaaaaaaaagagaagctttattggaagtgaaggaagaatctctccgaacaaaaaatgaactggagaaagaaaccaaggaacgcagaaacgagctgcaaaaatacgagagacgtgttttatccaaggaagaatccgtagataaaaaggcggatatcgtagaaaagcgtgagactgaatgcacagcaaaagctgctgaactgcagaaaagagaaaagaaagtagaagagcttgaacagaagggagtacaggaactggaaagaatttccggtctgacctccgaacaggcaaaagacgagttgctgaaaactgtagaagacgatgtgaaggtggatgtggcaagactctataaagagcttgaaaaccgcgcaaaggaagaagcaggcaagaaagccaaggaatatgtggtaaatgccattcagaaatgtgctgtggatcatgtatcagagacaacgatctctgtggtacagcttccaagcgatgaaatgaagggcaggatcatcggacgtgaaggacgaaatatccgcactctggaaacactgacaggtgttgatctgattattgatgatactcctgaggctgttgttctttctgcatttgatccgatccgaagagaagttgcaagagttgctcttgaaaagctgattgttgacggtcgtattcatccggcaagaatcgaggagatggtggaaaaggctcagaaagaagtggaagtgcagattcgcgaagacggcgaaaatgcagccatggacgtaggagtacatggaatccatccggagcttctgaagcttcttggacgaatgaaattccgttccagttatggacagaatgcattgaaacattccattgaggttgcacagctttccggaatcctggcaggtgaaatcggcgtggatgtccgtatggctaagagagccggacttcttcatgacattggaaaatccattgaccatgaagtagaaggatctcatattcagattggagtggatctttgtaagaagtataaagaatctgctgtcgtgattaatacagttgcatcccatcatggtgatgtggaaccggaatctcttgttgcatgtattgtacaggctgctgacgcgatttccgcggcaaggccgggcgcaagaagagaaacactggaaacctataccaacagactgaaacagctggaggatatcaccaatgaattcaagggagtagacaagtcctttgctattcaggcgggcagagagattcgcgtaatggtagtaccagagcatgtaacagatgcagatatggtccttctggcaagagatattgcgaagcagattgaagctgaactggaatacccgggtcagattaaagtcaatgtgattcgtgagagcagagcagtggactacgcgaaataattctgacaggtcatgcaccattgttcattaaatgaagtatataagccgtgtgaaagaaatttcacacggctttttgcgtacgaaggaagactgtgaatgacacaggcatattttggacgcaagtcccgtaaactggtacagggtgaggatatgaaaaaaagactggaactgtacagaaggggaagccttcctgtgtactggcttttcttttttggatttttggcaggagtggtgattccaaatgtaatgtggaagtatgaatggcatcagaaaacagcggcttctctgtatctgctggcagcttttgccgacaacagccttgacaaaggcgaatattttctgcaggtacttaaaatgaggggaagtgtatttctgatttcagccctttgtggagtgtctgtattcggggcgcctttggcggtgatgggaattttatatatgggcgttcgcacagggcttcttcttactatgtccattcttcagtttggacttcagggcggaattgtaggtctgggagccttgtttcctcagtacctcttatactttccttgctttttctggctgatgtggctgatataccggcagtctctggaaatctggaagagccgtgggctgattgccggagaggtatcctcctatgcgtttcgcgttcttttatgcgcggtggtctgtatgggaggaattttgctggaaacctggtgcaatcctccggttatggaggttctgatgaaaagcctggagcttttttgaaataacgatactgaaataatgatgagtgaaaagtgctttgattttaggaaaaaccagtgtataatgtatgatacactacttatgatctgggcgtattgaacagtaattcaaaagcggaatggacggcggagataaaaatggaaaagcttatcaatgattttattgaatatcttcacaatgaaaaaaatacttctggaaacacagaggtttcctatcagagggatctgaaaaaaatggctgcatattttgaaaaacagggaatcgctcatgcggacgaagtgacagaatcagatctgaaggcttatgtaagtgaaatgcatagcgcagactttgcatcttctaccatatccagaaatattgcatctatcagagctctgtttcattatctgtttaaaaaaggcgtggtttctgaggacccgtctgagaatttaagagcacccagaatagaaaggaaaatgccggaaattctgactgtacaggaagtagacaggcttctcagtcagcctaatccccatacaggcaagggaatcagggataaagctatgatggagcttctctatgctaccggaatgcgtgtcagcgagcttctggctcttaaaacagaggatgtgaatttaagctttggatatgtgatctgccatgacaatggaaaggagcgtgtgattcccattggaaatgtcagccgtgatatgatgcagaaatatatggatgaggcgagagatttttttgtgaagaatcaaagagaatccgctctttttacaaactgctccggaaagcccatgagcaggcagggattctggaaggtacttaagggatatgcggagagcgccggaatccacaaggatattacgcctcatacgcttcggcactcatttgcagtccatatgctgcaaaatggagcagatatcaaaagcgtacaggaaatgcttggccattcggatatttcttctacccagatgtatctgggactggatactgtaaaaatgagagacgtttacatgaaagcacaccccagaagctgaatgccggggtgtgccttcgatttccacaaagtattttaacagattaaatcatagtatcatttcgtaaaatatcaattaaatcacttttaagaagtttgcttccgcctatatagtaagccagaccaacaagtgcaaagacgaataaaaagaatattaaaacaggaataaatggtgcttttttcaaaaattccatcgggtctaagtaacttgcagtgatcataaaaccgactgtaattatagtcaatggagctgtgatggcaagagggcgtcctgcaatcactaatacctcaatagcaaacatttttttcatactttttggagacattcctattgaagcatatctgataaattctcgttttctctgtcttaaaaatcccagagtgttggaaaaaatgttggcaaggccaatggcagccagtaaaacgcataatgctccaaatatcagaatcattcctttcttcattgtcgcatcagatattttttcctgaatacggttttcgattgaaatgttatctttcggagacagtgtctgtaaaatttcattttgtaattcatttagttcagaaagagctgcttcttctgctccaagtattcgtatatatgtctctggttcagcatgaccgagtactcctgatacctgtttccacagtgacaaaggaataaattgaactaatgtataatcctcatattcttctcttaatgttacaggatcctgcgtataagcaagaacgggaatatctgctgatagctcagtattttcaatgttttgcagggtgatggttctttggcgattttttacaaaaggaatatattttttatagcgaaaattgctgtttaagctgtcccaaatacgattaagcacaatacttccgtccagccttggtacaatatttaattgtctgcaatattcctcaaagcttttatcatctataatgatgattggcgcttttacagagtagctgcatttttctgtatttatagaattatctgtgacagcctccgggcctcctaaatgtattaactcatcactgatttctgtctccggtatggaacattcagctattgctttttggtatacaagactgtttctgacatttggcagatttctaagctcttctccctgacgaaactcagaaatatcagtgtttttcagggttaccattatatcccaggcatcctgatacctttcaaaataagtataatttgtactgatatctgctagagtgaaaaagcaaagcattatagtaaaacttaagaaagaaagggtaagagaaaggtgagaagtacgaagcgctttactctgtgctttcagtgcattggcagccaattctccttctattccaaatatcctgcataataagcaggaatgctttttcttttttaagtgtagttcatctgtgccctgcaatgcctgaagaggagtcagtttaattaatttttttgcaggtaagcaggcagaaataaatacagttaaaactgacacaaaaatagttgccataaacacaacagggtgatattgaaaaacggcattatgtcgccctgctatttcctgtgcaaaaaaatttataatttttattgtcaaagcactgcctgcgattccaagcaaactgcccgttaaaattggaaggatacagagcattgcagcttcctgcaggaggcaggtaaaaatctgccctggcgtggctccgatactggacaatattccaaattgatggagtcttgcatacatagaaactgcaaaagagttatgtataatcaggattaaagaaacagataccacaagtaataaggcaataaaaaaggccattaaaagcggcggactattatcctgaggattgtgtaccatgtatcttgacaacagcagttcatgataagaggcggcagtactgtcaagatttaacttttcggttatcaatggcatatctttatagacagttcttatattttggaaccagacatcagcgacaatagttttttctgttgataacgtattattgatttcagctttttctacatttgaaaaattttttattatagataaatctgattcatctatcccggaaattcttccctgccagctgccctcatctattgtgatctgttcaatttcgtaaatccagaagttgtaaaacaggctgcatatcagtgataaaaacagagcagagataaaagctgctgtaacaatggatatgctggaggctttattctttttaataaagccagctgaaaaatctttccacattatacacaccgtcctctcctgtcactgatgatttttccgtcttctaaggttattatgcgatctgcttccaatgcgattttctcatcatgggtaatcagcaaaattgtctgattgagattacgatttgataatttgagcatatcaataatttctttggaatttttttgatcaagatttcctgtgggttcgtctgctaaaaggagagcaggacggtaaatcaatgctctggcgattgcagctctctgctgctgcccgcctgatagctgacttggaagaaaatctagtttgtctgaaatccctaacgaatttactatttgctcaaaatattcctgatttacttttttcttatccagtaaaagaggcattaaaatatttttctggatggtaagggttggaatcaggttatagaactgataaaccagcccaaccttcctgcggcgaaaaattgctgcctgtgtccggctcatagaagaaatatcaataccgtctacgagaactttccccttagtaggcttttctacacttcccagaatatgcagaagcgtagacttccctgaaccggaggcccctataattgcaacaaattcacctttttcaactgataaattaactttatccagagcccggacctgattagcgccagaaccatatacttttccgatacaatcacattttaaaatttccatgccagatgctcctttccgttatatgaaaattctctgttgctttttagtataacaaagaaaaatgacatcttagtgactgtaaatacggatttcgaagcaggctcctccatctggaagattgcgggcggttatatttccgttctgtaattcaaagatagattttgctaatgcaagcccaataccgatcccattggaagatgcattttttccgcgataaaatcgttcaaaaagatgagggatatcatcgggataaaaaccctcgccttcatcccatattaaaatttctgaatatataggattagtggaataatcacaatgtatggttccgttttgagtggaatgttccatacagtttttcagcaggttcagaaacgcttctatagtccattccatatcaccggtgatctcaacacagcctttgtctggaattaatatagatacaccttctttttgcagaagattgcttaaattatccgctgcaagagtaagcgcggtataaatatcaacttttgaatattcaaatggtaaagtgcctgcatctattttggataaagtaagcagtgcctcttctaatacacttaatcgttccagttgtttttttatttgttttgtccgtagatcaggcatttcattttgaataagctgcagggaaagagaagctgctgtaacaggtgtttttagctgatgagcaatattggcaagattatctgcaaaattgtttttggattttaatgctgcctctcttgtataaataagctgtgttactgttttatatatttcatcctgtaaaccggaaaattcatcctctttggtttgaatgactattttttctttcccgatatttatcagttccagataatcagtcagctcggatatccgcagtttttttcgccggttcatccaccataaagaagccaggaagcagccggaaatcattacaaatataatggaggaaaggataaaaaaatctgtgactgttccattataaaactgagtacttctatatccatatcgggctaaaaagagcgttttatcggagtgttccggggcggacgtcaggtattctttcacagctgaaagaatctgttgttctgtctcaggattattttctataataagttcacaaaattttgagagatgttcaaatgcagacttctggtacagattcaatccaaatattgatataagtaggattcctgtaagacagaatataattggaagaccgaaagccagaaattgtttttttctttctgtcatatggtgtcctccatacgataaccaaagctgcggacagttttcagacagccaggattattcaacttttcccgaagacgtttcattgtaactgtcagtgtgttgtcgtttacataaatcccattactgtcccatataaattccagtaattgtcctctggttaaggtttttcctttattttccattaaaagtaaaagtaactgatactctggctggcttaatataatttctatatgattgcagaaaacagtcattttttctttgtctaacaaaagatcatcacaggacagacgtgaattgttcgtttgtccggttcgccgaagcaaagcgagaatacgagaatacagtacatttaattcaaatggttttatcacgtaatcatctgctccataacctaaaccggctacaatatcatgggaatcgccgcgaactgtcagaaaaataaccgggagatgctcccagtgactccggatccatctgcaaagctcacttccctgcccgtcaggcatattccaatccagcagaacaatatcagggagagattgcagcagtgctgattttgcaagagctactgtagaaaaagtaattattttgcagttatgctgttcaagatattcttttacagagcatgcaatattttcatcgtcttcgatatagtaaatatctgtcattttcagtacctccagtcagatgagtttgccggaaaacagaatgcctgtttttcagcagacagtttgattctttgttcaaaagaaaaatgcccgaataagcctgtaaagtaaggttgttcggacatttaaaagatataaaaacatttcaggagtttatcagcacatttctgcaatcgtatacagaagcttctctgtatcttcccatccaagacaggggtctgtaatggattttccgtaaatatgatttcctccgattttctgatttccggattcaatatagctttcgatcatcaggccttttaccagagtttttaactcaggatctacaaggcggctgtgaagaacctctttggcaatacgaacctgctgctcatactgcttattggagttggagtgattggtatcaatgatcactgcagggttctgcaggttcttttcctgatatttttcccagagaagccgaagatcttcgtagtggtaattggggattgcctctccgtgtttgtttaccgcgcctcttaaaatggtgtgtgcaagaggatttcctgtggtttctacttcccagcttctgtaaataaaacgatgggagccctgagcggcagtaacagaattaagcattacactgaaatcaccgctggtaggatttttcatacctgcaggaacatccataccgcttactgtcaggcggtgctgctggtcctcaacagagcgcgctcctactgcaacgtaggaaagaagatcggaaagataacgataattttccggataaagcatttcgtccgcgcaggtaaagccactttcctgaatagcgcggatatgcattttccggatagccaccagtccggcaagcatattgggcttcttttccggatccggctgatggaccattcccttatatccttctccagtggtacgcggcttgtttgtgtaaactctcgggatgatcagaaccttgtctgaaatcttatcctggactttacgcaggcgcagcagatagtcgcacacagcatcctcattatctgcagagcagggaccgataatggcaagaaatttgtcggattttccggtaaatacgtcccgtatttcctgatcccttttttcttttaatgtctgaatggcagagtctaccggatattcattccggatgtcctcgggtgttggtaattttttaataaacgaaaagctcataataattgttcctcctcgacagtattatatacgattcttcatctgttgtcgatagagaagctgacagaagagctgcaacatgatgggtgcggaaggttaccgttcagaagttgctgtgaacggagtggacagtaaatgtttacagagtactatttgtgaacagagtgaatatcaacaggtacggttattcgcagcggtacagagcggtaatatgaaggctgcttaaaaggatttcgcttatgaggattccgtacagatagcctcggattcccattgcaggaacagcaaaaagcacaaaggaaattcttatcaggatcccggcggcattgtggaccaggcttcgtacattttttcccagaccgtgaagaatactgaccagggcagtattcatatacagaaaaggacagataaaggccatggtgcggatgtagaccccggcagtgggactgtgaaagagaacattgccaagaaaaggaccaaaaagaaaaaagcctgccgcgcaaagagttccaagaagcaggcagccggtacacgcctttcctgtaatgtgccggattctcctgcggaagccaagagcctgcatttctgctacagagggcatgagcataacagaggcggaatttgtgacagtggaggggaaaaggatcagagggagagccattcctgtaaatactccgtaaatgccaagggaatctgaaggggacaggccataaagctgaagtctctggggaatcaggactacctcaatgcttccaagcagtgtcagaagcacccggttcagggtaagcggaaaagaggtatgacaaatttccctgagccttgctgcaaaactgtgcgcctgaaaaaaggaatactgttctctggaaaactctgccgcaatcagcagaagcccggcagatgcggcaaaaagctctgaaacaagggcgccgcctgcggcaatggatgcggtaacaggcctgttctgggaaatcaggatccggcagatcagaaaggaagagcttacccggacaagctgctccagaagctgcagtccggaaggaatgcctgttttttttctggcaaaataatagctgttgatacatgaatgaatggcgcttaaaggaaaactgaaggaaagaatctgcagcagaggttctgtcaggggctgcttcaggatctgtccggcaaaaaaatcggaatttgtatacagaatccatgaggctcccacagaaagcgagaaagcggtaagaagtcctgtacagaagatattttttgcttctctgtgatgctttaaggcagtctgagatgcgatcagacggttcagagcagtctgtatgccggaggtggtaagggcaagtacaaggttctgcagaggaaccataagctgatacagtcccagtccctgggcaccaatagaatgtgacaggaatattctataaaagaagccaatgaccctgctggcaagtcctgtacaggtcaggataaaagttcccttaatgaaattctgttttgacataattatatcctgataactttttgtaaatatatgcaaaaaataaccttgacagaacgaagagtatctgttactgtaattacagtaaatccgacaaaaatactgggaattaaaagaggtgagcagatgaagctgtcaacaagggcaatatatgggcttcgagctatgattgacctgggagtatacagtgaacaggaagctgtttccattcagagtattgccggaagacagaatatttcagtcagctatctggaacagttaatggcaaagctgaaacgtgccgggctggtggaaagcaccagaggcgcatgcggaggctaccgcctgggaagaccggcagaggagatttctgttggggatattctgagggttctggaaggcggtctggaagcggcacagtgtccgggtacgtcccctgaggaaaactgtgagacaaaggatatctgtgtggcaaagcttgtctggaagcggatcaatgacagtattacccaggcagtagatactctgatgcttggtcagttaatagaagaaagcagaaaaaaacaggaagagaaaatgtaacattgtttattattgcaggaggacagagattatgaataaattgatttatcttgacaatgcagctaccacaaagacagctcctgaggttgttgaggcaatgctgccgtactttacagaatattatggaaatccatccagtgtatatgatttcgcagtccacagcaaggaggcggtaacaaaagccagagagcagattgcaggagtcctgaaggcaaaaccggaggaaatctactttactgccggcggttccgaatctgacaactgggcgttaaaggctgcttttgaagcatacaaagcaaaaggtaatcacataattacaacaaagatcgagcatcatgctattcttcatacatgtgaatatctggaaaaaagaggagcaaagattacctaccttgatgtagatgaaaacggaatcgtctgtctggaggaactggaaaaagccattaccccggaaacaatcctgatttccattatgtttgcaaataatgagatcggttccgttcagcctgtcaaagaaatcggaatgattgcaagagagcatggaattcttttccatacagatgcggttcaggcttttggacagcttgctattgacgtggatgaatgcaatattgatatgctcagctccagcgcccataagatcaacggaccgaaaggaatcggattcctgtacatccgcaagggtgtaaagatccgttcctttgtacacggcggagcacaggagcgcaaacgccgcgcaggtacagaaaacgttccgggaatcgtaggatacggcgctgccgcagagcgggcggtcaataccatggaggagcgtacagctaaggaaatccagctgagagattatctgatcagcagactgacatcagagattccttacgtgaagctgaacggagatccggtaaagagacttcccaacaatgtcaatgtaagctttcagtttattgagggtgaatccctgcttctgatgcttgacagctatggcatctgtggttccagcggttcagcctgtacatcaggatcccttgacccgtctcacgtacttctggctatcggacttcctcatgagatcgctcatggttcccttcgtctgacactcagcgaagagacaacaaaggaagatctggattacacagttgagaagttgaaagaaattgttcagaatctgagaaatatgtcacctctttatgaggattttgtaaagaagcagaaataaaagacctgtattcagggtatctgaactctggaagctgacaggaatgaagataaaatacgatattatcacatagcaggaggaaataaattatgtacagcgaaaaagttatggatcattttcagaatccgagaaatgtgggagagattgaggatgccagcggcgttggaacagtcggaaatgcaaaatgcggagatattatgagaatctttcttgatattgatgacgagactcatattattaaggactgcaagttcaagacctttggctgcggcgctgcagtggcaaccagcagtatggcaaccgagcttgtgatcggaaagaccattgaagaggcaatgaaggtgacaaacaaggcggttatggaggcacttgacggacttccgccggtaaaggttcactgttcacttcttgcagaggaagccattcatgcggctctctgggattatgctcagaagaatcacattgtgatcgaagggctttccaagccaaaatccgacattcatgaaggtgaagaggaagcagaggaagagtattaagaaaaaaggctgtgacagacagaatccggaatgttccataagggacagaaccggaggctgctgttgcagccttactctgcttatattataaaatgatattgcgaggtggaagtttgactggacttacagaggaacaggtaaaagagaggattgaagcaggacagacaaatgctgacgaaaatcccaataccagaacctacaagcagatcgtaaaagagaataccctgacgttttttaactttctgaaccttgtactgcttgttctggttcttatggtaggctcgtttaaaaacgcgttttttgtatgtatcatcattatcaatacgctgatcggaatcgctcaggaaatccgggcaaaaaaaacaatcgacaagctggcgattctcacagccaaaaagtccattgttctgagagaaggaaagaaatggacagttcctacagaagagcttgttctggatgatattgtgtgtctgaaaacaggagatcaggtgcctgcagacgccaggatactggaaggaaacctggaggtaaacgaatctcttttaacaggagaagcggacaatcttccaaagaatccgggagacgagctgttttcgggaagctttgtaacctccggtgaggcttcctgccagatcattcatgtgggaaaagataattatgcttctcagatcaccagtgaggcaaaagaatttaaacgtcataattcagagctgagaaactctctgaacattattcttaaggtgatcagtattatcattgtgcctattggagcgatgctgttttataaacagtattatatggtaggcgacagcttcagggattccattgtaagtatggtcgcaggcgtgctgggaatgatcccggaggggcttgtacttctgacaagtgttgccctgacgctgggagctcttgtacttgcaaacaaaaaaactctggtacaggagctgtactgcattgaaactctggcaagagtagatacgctctgtctggataaaaccggaaccattacagaaggcagtatgtgcgtggagcgagtagagccgttcatccgaagtaaggaatgtgaggcgtccggggaaaatcagatggaagaaggcactgctgcggaagcggtggcacagcaggatgtgtctgtgacggaaaaaccggaacaggaagaagtatccgaaccagagaaaacagaacagccgggatctgcagcaaaagcagaaaatacagaaaaaatagcagaaacaaaaaatactgccgggacagaaaatgggaaacaggcggaactgttttcagaagaaccaaaagccgttgatatgaaggaaatcgaagagatcatgtgcagccttatgcatgtgctgcgcgatgagaacgctacggcaaatgctctcaggaaacgttttcctgcaagacctgttatggtctgcgagcatgtgataccgttttcttctgaccggaaatacagcggagcagtgtttgcagaaaagggaacctatcttatgggagctgtgcagttcctttttccggaaaacaatcaggacatgatcagtcaggctcagaaatacgcagaagaaggtctgagggtacttgttctggctcacagtccggaaaagtccgagggaacagagcttccgaaaggtctggaaccagtggcatttctgcttctgacagatgtgatccgtgaggaagcgcctgatacactgaaattctttgacagtcaggaggttgatctgaaagtaatttcaggagatgatcctgtaaccgtagcggccattgccagacgcgccgggctgaaaaatgcagatcagtatgtggatgcaactactcttctcacagaacaggacgtacagcgtgcagtttcagagtacagtgtatttggccgtgtcacacctcagcagaaaaaacagatggttcaggcacttaaaagccagggccatacagttgccatgaccggtgacggtgtgaatgacgttcttgcgctgaaagaggctgactgcagtattgccatggctcagggaagcgatgcggcaaagaatattgcaaatgtggtgctgttggattccaattttgcatccatgcctcacattgtaaatcagggccgacgggtagtaaacaatatccgtaccgcagcgtctatgttcctgatcaaaaccttgttttccgttatgctgtctattttaactatctgttttggaaacgcatatccctttgaaccaatacagatgtctcttatcagcgcctgtgcagtaggtattcctacattccttcttgctcaggaaaataattacgataagatcgatcatactttcctgcggcatgtatttctgaatgcgttcccggcagcaatcaccataagctcctgtgtgtttactattatgctggtatgtcagaatgtatatcattccaatgccatgctgaatacagcctgcgttctggtaaccggctggaactatatggcggcgctgaaaaccgtgtatgcgcctctgaaccgttacaggaaggtgattatttatggaatgcagtttattttctttgctgctgcagttattttccagaatctgctttcccttggatctctggactttggtatgattattctggtatttatcctcatgacctttgcgccggttcttattgacgtgattaccggatggatacggaatatttacgccaggtcactggataaagaaaatcccggacctgttgctgcttttctgacaaagcttcaaaacgggaaaaattaataaaacgaacaggatcctcttcagaattgtgggggatccttttttgtgtttgttcattttctgttactgtttacgactttaacagtaacctggtcaaaatgcattccaaatcacctttgatgatggtattttgccctgtatgtctcgggattttggcatatacatgccaaaacaccttgcaggatagtaacctgtgaacagtatccattttttattaataattaaaaaagataatataatcattgcatatgttaataatacatgataaaatacaaaaagaaaggttgaggcttatggaatttaaacagttagaatcatacattgccattgtaaaatataaaaatcttacaacagctgcagaggccctggggatttctcagcctaccatcagtattcatctgaagaatctggaagaggagctgcataccaggctgatcatccgcactgccaaaaactttgaggtgactcagagaggacaggaattttttatatgcgcccagaatatcctgaagcttcgggacgatctggtaaacagctggaacggcagggaggcggagattatccgcatgggagtttccaccattccttccgcctatattttgcctgaggtactgcctgtttttggaaaagaacatgaaaatgtatatttttccattgaccagatggacagtcagaaggtgattgatgaggtacataaaggaacttacgatcttggactggtgggaatgaaaacagaggacgagcttctggcatttgagcagttttaccaggacaggctggttgtgatcactcctgtaaaagagaaatttctcaggatgaaggagcaaaaagagatgcctgtggaatgtctgttccaggagccggtgatacttcgtgaggagggcagcggaagtgggaaaagcgcaggaagatttctggaaaaaatggggataaaggaagaaaagcttcatgttgctgccagaatcaatgatcaggaatccattaaaaatctggtggcaggaggactgggaatttccattgtatccgaaaaggctgtaaaggactatgtggaatccagacggcttcttcagttcagcctgccggaggaattctccggaagggagttttatattgtgtaccagaaaaattatattttaaaagaatgtgcaggggaatttataaagtttctgaaggcatatcagaagtgagcggagcgctgctgccatagggtgtaaggaaacaggctgtatgaacagtaatctgaacaagaggatgcgcagcgctgctgccatagtgtgtaagaaaacaggctgtatgaacagtaatctgaacaagaggatgcgcagcgctgctgccatagtgtgtaagaaaacaggctgtatgaacagtaatctgaacaagaggatgcgtagtgctgctgtcataagatgtaaggaaacagaacagtaccggcaccagagagtgcagacagaaaaaatacccggcagaaaaaaggaaggagatacgaaatgattcagttaccggaaaagtttgaaacctatgcggaggccagaaaagcaggatttcttcgtatgaaacagttaaaggagtcaggaagaaaagtggttggtattttttgctcctttgtacctacagagctgatcgaggctgcagggggaacagcagcgcctctgtgcgcaacaagtgaggaacccatatcggcagcagaggcagatctgcccaaaaatctctgccctcttattaaggcaagctatggatttgctctcacagatacctgtccttatttttatttctcggattttattgtgggagaaaccacctgtgacggaaagaaaaaaatgtttgagctgatggacaatatcaaggaaacttatgtcatgcagcttccggcaagaagagacgaggcagctcttgacgcgtgggaaaaagaggtggtccgtttctgggaaaagctggaggatttttacgggatcaccattacagaggaggatgtaaaaaaagccattcgcctgaaaaaccgggaacgtgaggtgatgcttcgttttctggagcttggtaaattaaacccggcgccgatttccggttatgaaatgggaacaagactggacggtcttggctttaatccggatattgaggaacgctgcaggattattgaggcaagaacagaggaggttataaaagactgggaagaaaactacagaggcaaattatcaaaacgtccgaggattctgattaccggctgtcctaacagtggaatccgtgaaaaaacaattaaagtgatcgaagagctgggagcggacgtagtggcgtttgactgctgcaacggtacccgtgaaaaagtggagaaggtagatgaaacgcttccggctgcaagagctcttgcaaaaaaatacctgaatattaactgttctgttatgagtccaaatgaaacccgtatggattatatcagcaatatgatcgacgagtatcaggtagacggtgttctggagctgatcctctgtgcctgccatacctactccattgaggcgtacaatgtaaagaaaacagcaatggcaaaaaatgttccttatctgatgattgaaacagattactccaaagcagacagcggacagatcaatacccgtctggaggcatttctggaaacaatcagtcagtttaaataaaaccggaagaagagaaaggtggatatagttatgaaaaaaacagtagacgcaatgggagatgcctgtccgatccctgtagtaaaaacaaaaaaggttatagaagagctgaaagcacagggaggcacagtagaaacctttgtagacaatgagattgcagttcagaatctcataaagctgggaaagagcagcgattattctgttctttctgaaaagctggaagaaaaaaaattccgtgttgaaatccaggtaacggcaggagaagcagcgcagatgcaggagcaggagccttcctgcattcctgatatgagacgcaggaacacggtagtggtaatttcctcccagtgtatgggagagggcgatccggagcttggaacagcactgatgaaaagctatatttacgcactttctcagcaggatcagcttccctctaccatactgttttataacagcggggtgaagctggcctgccaggatgcgcccacactggaggatctgaagagtctggaggctcagggagtggaaatccttgcctgcggaacctgcctgaatttttacggactgtcagaaaagcttcaggcaggaagtgtgacaaatatgtatgtgattgcagaaaaaatgagccaggcatccctgattatcaagccatgataagagaaagaaagccctgtgtggtactgactttttccactacaacagcagccatgtccatggaaaaaaggtgcggtgagcataagatacccggacggctgatcccggttccaagagagatcacagcaggctgcggccttgcctggaaaatgccggaagaggattatgaaaaatataaggacgaggtggaaagtctgaacattacagtggagcagaaggtttggctgaaattataaaaataaggaaataggcgatcatggaatatattggaatagacattggttctacctgtgccaaggttgctgttctggatgaggatgagaacatccttcatcagtctgtgcagcctaccggatggagcagcgtggatactgcagagatcattaaaaatatgcttctggaaaagggaatttgtcctgaaaccggaaaagttgtggctaccggctatggaagagtatctgtgccctatgcggacaaaaccgtaactgagattacctgccatgccagaggtgcagtatggcttcataagaaaaaagatatgacagtcattgacatcggaggacaggataccaagatcattattctggaaaacggcatggtgaaggattttgccatgaatgataaatgctctgccggaacaggacgctttctggaggtcatggcaaataccatggctctgagaccggatgcgctctgtgagctggcgcgaaagggaaagaaggtaaaaatcagctccatgtgcacggtttttgcagaatctgaggtaatcagcctgatcggacagggtgaaaaaaaggaaaatattgcttttgcagtggtaaattcgattgcagataaggtagcggctcagtgcagcaagatgaatgtgggaaccggagaagtatttcttaccggaggcttatgtgaatgcggctatcttcaggaaattctggaacagaagcttggctctcccgtgcttacgggaccggaatgccgatacgcaggagccattggggctgcgctttgcagcagaaatatataaaacagaggagaagcgttatgatttattttgataatgcagccaccaccatgcataaaccggaaacagtgattcatgcagtggcgcaggctttaaattctctgggaaatgcaggaaggggcgcccatgaggcgtcccttgatgcttcccggaatatttatggagtcagagaacggattgcagatttttttcacggagaagacccgtcgcggattgcctttacatcaaattctacagagagcctgaatactgcagtgaaaggaatcctgaatccgggagaccatgtggttactacggttctggagcataattctgtgcttcgtcctctttacgaaatggaagaaaaaggagtggaagtgacaatccttccctgtgatgagtatggaatggtttatccggaggattttacccgtgcgattcgtccaaatacaaaggcatttatctgtacacatggatcaaatttaacaggaaatgtgctggatgttcaaagcattggtgcagcagccagggagagggggattctttctgtggtggatgcctcacagactgccggagtatttgatattgatgttcagaagatgaatattgatattctctgctttaccggacacaaaggacttctgggccctcagggaacaggcggcatgtatgtgagagcaggggtgaatgtccgtccgctgaaatccggcggaagcggaataaagacctttgagaaaaaacacccttcacaaatgccaactgctctggaagcaggaaccctgaacggacatggtctggcaggtcttggggctgctgtggattatctgaaccggcaggggctttcctttatccgtgcaaaagagcaggcgctgatgaaaaagttttatctgggagtgcgggatattccgggagtgaaggtttatggggatttccgtaccatggaccgttgcgccatagtaactttgaatatcagagattacgattccggcgaagtgggcgacgccctgtatatggattatggcattgccacaagaacaggggctcactgtgcgccgctgatgcaccaggcgctgggaaccacagagcagggagcggtacgcttcagcttcagccattttaatacagaagaagagatacagagagggatagaagcagtcagggaactggcggagtaggatttccgccagttccctgctaatataacctgattatttttttctgcaaagccagaaacagccgaaggcaggaatctgaacgcctttggcttccatttcacgtccggagatcaggtctgtgtatatgccgtcttcttcgttgatccatgcaactttatcgtattcactgaagttataaattccaatgaatttctcttcttcattttcacgtacaagagccaggatagaagaatcccaggtatcaatcgtatgaagagaagcatcgctgttaaagacagaatgaacttttctgagtttttccagatggtcaagtgcaggaaacagtttcccctgtactgtctctggtctgcggcggttttcggcaagatcccatcggaagtcgcctctgtggagatagcgggaatcagcggccttttcaggattctcatggtaggaataatcgttcagctggccgatttcgtcaccgctgtaaataaccgggatgcctgactgagaaagcataaaggcatggagcgtgatatcataacggattcctctgtttaccccttcttcgtttccttcaaagccaaagcgttcaataccacacagggaagcagttgttccacacagacgggcatctcccagccggggatcatcattgtacagttctcctcgtgcaaaagaatccggatagcttcctgtcaggaaggcattcaggtattttttgtgaggaatttcctggataccgaagttactcaggaaatcgtaatccaggccccagccgatgtcgtcatgacagcggaggtaattctgaaatacataatcccgcggcagatcagcaacaagatcaagctgacggcgcaaaagagagacatcccgtgttgcaactgtatgccaggtagttgccatggttgttacattataaagaagatgacattccggtttttcaacagttccaaaataaggtactactttttcaggagacataacaacctctccaagaagaagcacacccgggcacacgatctcgcagatcatacgcataatacggacaatagtatgtacctgaggaagatttcggcagtttgttcccagctgtttccagatatagggaactgcgtcaagccgtataatatcaactccctgattggcaatataaagcatgttaaagatcatttcgttaagaactacaggatttctgtaattcagatcccattgatatggataaaaggtagtcatgacatgtttctggatatcgtccagccaggtaaagtttccaggagctgtagcagggaacacctgaggacaggttttttcatataaggcaggaatatcataggaatcaaagaagaaataacgatcctggtactctttttctccggcgcgggcacgctttgcccattcatgttcttcggaggtatgattcataacaaagtcaagacatacactgattccacgcttatggcattgggaagtcaggtgagaaaattcttccatggttccaagctctttccggacagtacggaaatcagaaacagcatatccgccgtcactgcggccttcaggagatgcaagaagcggcatcagatgaagatagttgacattacattcctgtacataatcaagcttgctttccagacctttcagtgtttttgcaaaggagcttacatacatcatcatgcctgtaagatcattgcgtttataccaaagagaatctttttcacgggaaagatcagaagcctttaattcagtatttcttgtatcataaaatgttttcaggccatcaagaagctgagaaagatgttccataacaagaggatcatcctgataaagctcgcagtacagccatttcagctcatccttgtgatgattcagacgggtctgatatacagagtcatccttttccaccgcagatattttcacaggctcggttttagaggtttcaaccttaatgggttcagtcttttttgtctcgactttcacaggctcgattttagaggtttcaaccttaatgggctcggtcttttttgtcccgacttttgcaggctcggttttggaggtttcgaccttaacaggttcagtcttttttgtcccgacttttacaggctcggttttggaggtttcgaccttaacaggttctgtcttttcggtttcgatttttaaggtgctggtctgcggagcgttggaagtggattttatgcgctctgcctcagcccttgcagcagctttctttttctggagtcttttctttgccatattcattctcctttgcttatcattcagaatcagcattgtgttccgtaaataaaagaatagaatttcgctgattttccggtacttccggtacaattaatggttataaaatgtaatttcccacccgttttgagatattgtctgacaggttttatagtaatcttacagggggagcagaaaaatgtcaagtatgcacagtggaggtataatggcagcaaaaattcgtattatagcagaaagacttccttattttacaatcatctgtcagaatttccggatttaaaatatactgccggaaaatctgacaggttgattttttcaggagagtctgataaattccggttttctgtttttgaatacagtataataccggaagccgcagtcactgagaacctttgccgctttatcaaaggcaaaagatattttttccggagagtgggcgtctgctcccacagtaatgatctcgccgccaagctcgcggtaacggcggatcacagcagtgcagggattgggctctccaagtccataatgataaccgcctgtattcagttcgattccgatatttttacggaccagtgtgcgaagtatttcgtccagaatatcctgatatcgttcataactgtagtaaagattcttgtttggcccgtagcgcacaatatagtcgatatgtccgtatacatccatttctgagaatacatccagattttccaggattgactcaaaatattccatgtagccctgggattcctcacggcctttaaaatattcaccgtaatagggatcggagccgtgaattacatgggaggagccgattacaaaatcaaagggatacagcttcagatgattttttaaattttctttcagatgaggctgaagcccgtattcaataccgaaatttatcatgatgctgtctttatatttttctcgcagaaaagacagtctgcgtgcatatgcgtcaagatccagatgaaaaatctgctgatccggagtaggcgggtagtccgggtccagatgttcggtaaaacagactccttcaagcccccgtgatatagcgcctttgatcatattttccatgtctgtgtcagaatctgcagaaaaagaagagtgcatatgacagtcccataaaatgctgtttttcatagaaaccctccgttatgtatgttataagccgattatagcacagagatttactttttttgtaatgttttttccaaaatagtcttgaatttttgtatgagattcgatacaatatgttcaggttgacgtttctttaacaatagagggagcgccataatcaaccatttaattcataggaggaatttatcatggcagtaaaagttgcaattaatggatttggccgtatcggtcgtctggctttccgtcagatgtttggagcagaaggatttgaaatcgttgctatcaacgaccttacttccccgaaaatgctggctcacttattaaaatatgactctacacagggcagatatgaactgtgtgacaaagtagaggctggagaagactctatcacagttgacggaaaagaaatcaaaatctacgcaaaagctaacgctgcagagcttccttggggagagatcggtgtagacgttgttcttgagtgtacaggattctacacatccaaggacaaagctcaggctcatatcgatgcaggcgctaaacacgttatcatttccgctccggcaggaaacgaccttaagacaatcgtttacaatgtaaaccacgaaggtcttacaagcgaagacaagatcatctccgctgcatcctgtacaacaaactgccttgctccgatggcaaaagctcttaacgatcttgcagctatcaagacaggtatcatgtgcacaatccacgcttacacaggcgatcagatgacacttgacggaccgcagagaaaaggcgatctgagaagatctcgtgcagcagcagttaatatcgttccaaacagcacaggtgctgcaaaagcaatcggccttgttattccggagctgaacggcaaacttatcggtgctgctcagcgtgttccgaccccaacaggttctactacaatccttacagcagttgttgaaggaaatgtaacaaaagagcagatcaacgcagctatgaaagcagcttccaacgagtccttcggatacaacgaagacgagatcgtatccagcgatatcgtaggaatgaaatatggttctctgttcgatgctactcagactatggttcttccgcttgataacggaacaactcaggtacaggtagtttcctggtatgacaacgagaactcctacacaagccagatggttcgtacaatcaaacactttggcaaacttctcggagcataatgtttcatacgaaagaatgaaatagactcagtaaggggtccggtctgattagggccggattccttttttattaaaattcggaggttatacgatcatgggattaaataaaaaatctgttgatgatatcaatgtaaaaggccagaaagttctggtaagatgcgactttaacgttccgcttaaagagggcaaaatcacagacgagaaccgtctggttgctgctcttcctacaatcaagaaactggttgctgacggcggaaagatcattctctgctctcaccttggaaaaccgaagggagaaccgaaaccggagctttctcttgcacctgtagcagttcgtctttctgagcttcttggacaggaagtaaaatttgttgcaagccctgttgttgtggatgacacagtaaaggcagctgtagacgctatgaacgacggagagatcgttcttcttgaaaacacacgttatcgtgcagaggaaacaaagaacggcgaagctttcagcaaagatcttgcttcccttgcagacgtatttgtaaacgacgcattcggaacagctcacagagcacattgctccaacgttggtgttacagaatttatcgacacctgtgtagtaggatacctgatgcagaaagaaatcgacttccttggaaaagcagtagaaactccggtaagaccgtttgttgctatccttggtggcgcaaaggttgctgataagctgaacgtaatctccaaccttcttgaaaaatgtgatactctgatcatcggcggcggtatggcttataccttccttaaagcaaaaggtcttgaagtaggcgcttctcttgtagatgatacaaaacttgactactgcaaggaaatgatcgcaaaagcagaaacacttggaaagaaacttcttcttcctgtagatactgctatcgcaaaatctttcccgaacccgatcgatgctgagatcccggctgagtatgttgactgtgacgcaattccggcagacgtacttggacttgatatcggaccgaagacagcagagatttatgcagaggctgctaaaacagctaagactgttgtatggaacggtccgatgggcgtattcgagaacccggttcttgcaaaaggtacaatcgcagtagcaaaagctcttgcagaaacagacgcaacaacaatcatcggtggtggtgactctgcagcagcagtaaaccagcttggctttggtgacaaaatgagccatatttccacaggcggcggcgcttctctggaattcctggaaggtaaggaactgccaggtgtagcagcagctaacgataaatagaacacttaatgaggacgagcgagagcgaagttccgaatttagtgtgaatttagttcgaaggaacttaatgagggcaagcggaagcgcagaccgaatttagtgaatcgaacttccttgaccagcaaaagcgagcttagttgagggaatacacgagaaatagcaatcgtattgcagtgaatcacacttccctgtagaagaggggaaacaatgattaccactgatttgcgatggcagatcagatataagataattttaacaagataggagattatatcatggcaagaaagaaaattattgctggtaactggaaaatgaacatgactcccagcgaggctgttaaattagtagaaactctgaaaccgcttgtaaataatgaagaagttgacgtagtattctgcgttccggctattgacattatcccggttgtagaggcatgcaaaggaacaaatattcagatcggcgctgagaacatgtactttgaggagaaaggtgcttacacaggtgagatttctccggctatgctcacagatgcaggcgtaaaatatgttgttctcggacattctgagagaagagaatattttgcagagacaaacgagactgtaaacaaaaaaatgctgaaagcttttgagcacggaattactccgatcatgtgctgcggcgagactcttgatcagagagagcagggcgtgacaatggatttcatccgtcagcaggttaaggttggtttccagaacgtaacagcagatcaggcaaaaactgcagtgatcgcttacgagccgatctgggctatcggaactggaaaaacagctacaactgagcaggctcaggaagtttgcgcaggaatccgcgcatgcatcgctgaaatctatgatgaagcaacagcagaagcaatccgtatccagtacggcggatctgtaaatgctgcaactgctccggaactgttcgtacagaacgatatcgacggaggtcttgttggcggcgcttctctgaaagaagagttcggaaagatcgtaaactacaaataagtatcaactgtatatttaaacaataaaaacaccgcagaatatccggttctggaaacacaatttcgggaccggaatgttctgcggtgtttttgcgtaaatgtaattatagatggattttaagggaaattcagcataaactttaacacgttacttgacaaatgtcctctggcagtctactattaaaaaaacatccatatgtcagagaaagagaggagtttttttatggagaaaaaggtgattcatgcagcccttcttgggtttggaacagtgggaacaggagtttataaggtattgaaaaatcaggaagaggagatggaagccaagcttggaagtgttgtccggatcaaaaagatcatggttcggaatctggaaaaggcggcggcaaaggtggaagatccttctgtgcttacaaacaactgggaagaaattgtcaatgatccggatattgatattattatagagctgatgggaggaattgagcctgccagaacctgtattctggaagcgcttgaagccggaaaacatgtggtttctgcaaataaggatctgatcgctgtatacggaaaagaacttcttgatacagcagaaacacatcaggtggattttctgtttgaagcggcagtggcaggcgggattccgatcatccgtcctctgaagcagtgtctggcaggcaatcacatgaaagaggttatgggaattgtaaatggaacaaccaattttatacttacaaaaatgacccaggataaaatggagtttaaggaggctctggctcttgccacggagcttggatatgcggaagcagatcctacagcagatattgaaggtcttgatgcaggacgaaaggttgctattctggcttcggttgcatttaattccagagttgtttttgatgacgtatatattgaaggaattacaaaaatttcagcaaaagatatctcttatgcaaaagaaatgggctgtgatataaagcttctgggcgttgccagaaacacagaggaagggattgaggcttacgtatgtccaatgctgattccaagcacacatcctcttgcttcagtgaatgattcttataatgcagtgtttgtaaatggagacgcagtggaaaacgccatgttctttggacggggcgcaggtgaactgcccacagccagcgccgtagtgggagatatttttgatattgcccgtaatatgaaggcaaactgctgtgcaaggatcggctgtacctgttataaaacaataccagtgaaaaaaatggctgatacccggaactgttatttcctcagacttcaggttgaggaccgctgcggtgttctggcagaaatgactgctgtttttgcaaaatatcatgtaagcgtggctcagattatccagaagcaggcaaagccaaatgaaagcgcagagatcgtagtgatcacaggaaaagtacgggaaggtgatttccgcacagcaatggaagagctttcaggaagaagctttgtacataaaatatccagtatgctccgggtatatggagaatagcagaacaaccggctgcttacatgctgccatctcagatattctgttttactttagaggagaagctgatatataccagataaaataccaggaatttttcagggaaaatccttgaaaaattcctgatttttggtagtatataataggtaagaacaagtaaagtaagactctgtgattatgcagagaaattatacaaaaaggagaacattatgagcaaaaaaccaactgttttaatgatccttgacggttatggactgaatgacagacatgacggcaacgcagtatatgaggcaaagactcctgttatggacagtctgatggcagaatatccttttgtaaaaggaaatgcaagcggactggcagtaggtcttccggatggccagatgggtaactctgaagttggccatatgaatatgggcgcaggacgtattgtatatcaggagctgacaagaatcacaaaagaaatcaatgacggcgatttctttaaaaatgaggcgcttctggcagcaatgaaaaatgcaaaggacaacgattctgcaattcattttatgggacttctttctgacggtggcgttcacagccacaatacacacctttacggacttctggaaatggcaaagagagaaggactgaaaaaggtttatgttcactgcttcctggatggccgtgatacacctccggcttccggtaaaggatacattgaagagcttcaggcaaaaatgaatgagattggcgtaggtgagatcggcgttgtttccggacgttactatgcaatggacagagacaaccgctgggatcgtgtagagcttgcctacaaggctcttactcagggcgaaggcgtaaagggaaccgatgcggcagaggctgtacaggcatcctatgacaatgaaaaaacagatgaatttgtacttcctactgtaatcgaaaaagacggaaaaccggtagcgtctgttcaggatcacgattctgttgtattctttaacttccgcccggaccgtgcccgcgagatcacaagagctttctgtgatgatgatttcaaaggctttgagcgggagaagaagctggatctgacttttgtatgcttcacaaattatgacgatactattcagaataagatcgtagcctttaataaggtacagcttcacaatacctttggcgaatatctggcagcgcatgatatgacccaggttcgtattgcagaaactgaaaaatatgcgcatgttactttcttctttaatggcggtgtagaagagccaaataagggagaggacagaatccttgtaaaatctccgaaggttgcaacctatgaccttcagccggagatgagcgcgcctcaggtttgcgacaagctggttgaagctatcaaatctgacaaatatgatgttgtgatcatcaattttgcaaatccggatatggtaggtcacacaggtgtggaagctgctgcagttaaggctgtggagacagtggatgaatgtgtgggaagagcagtagaggctctgaaggaagtaaacggacagatgtttatttgtgcagaccatggaaatgcagagcagcttgttgattatgaaacaggagaaccatttactgctcatacaacaaatccggttccgtttattcttgtaaatgcagatccgaaatatactctgaaagagggcggatgtcttgctgacattattccgactttgattgagcttatgggaatggaaaaaccggaagaaatgacaggagaatcccttttgatcgaaaaataaaacataaaaactgtgatggaacgcaggcggaaactgtcaataagataaagctgaagatctccatctggaataaaactctgagcaatacggggaaaccttgtactgctcagggtttttgtgtattaaggataaaaaagacaacgcaggatacaatataagtagcgtctgctgttataataaaattatggatattctggtatattacgaaaaaacatagggcagatatggtacaaataccatgaaatatgttataatatgaaagattaaaaatccgatacacaaacagcagttttttgatgttacagtctaggagaatggagatagatgagcagtaagaaaaaaagaaatgatgtggggtccggacccggagaaaacattgatattgaagataagatcaatgcggcaatggacaagatcatgaaagatcctgaggaagagagaaacagttccaaaaggaaatacgaaccggacaacggagagtctgaaacagaagaatacgaatcagaagaaagatatgattcagaagaatacgaatcggatgaagcatatgattctgaagaggagtacgaatcagaggaggactatgatcctgaagaggagtacggctcccaggaagaacatggcgaagatgcggaatatgatgaagaaggatatgatgagccggaagaaaaaggttcccaggatttttcccgtaatataaaagcttccggaaaattaaaatcagccagacctcagccggtaaaatatgtgccgatggatgacatagaagagaagctggcgcttcttccggaaaataaaaggaaaaagcataaaggtttgaagatcacaggactggcagccgccatggcggttgttgttgcaggatgcgcttatgcgggaatgacctattattattctgaccgcttttttgagggaacctggatcaacggaatcgactgttcaggcaagacggcatacgaggtagaaacggctctggcagataaggtacaggattattccattcaggtatcttccagaaaccaggaacctcagatgattacaggcgagcagatcaattaccagtatctgtccaccggggagacacttcagcttctgaaaaatcagaagccctatgagtggatcaaaggtttttatgagcagaaaagctatacggtggcagaaaatgtggcctatgataaaaccctgcttcagcagcaggttacagctctgaactgtgcaaaaaccgagaatcagacagcgccggaaaacgcctatgtagcttttaaggataatcagttccagatcgtgccggaaacagaaggcacccagcttaacgtgaaacaggcttacaggatcctggatcaggctgtagctgacacacaggcgtctattgattttggaacagcgccggatgcatatgtgtcagcagaagtaactcagaatgacccggagcttcagtcagcgttggaggcctgcaataattatacaaaggccagcatcacatatacctttggagaccagacagcaacgcttgacggaaacacgatcaaggactggcttcagtttgacgaaaaaggccagcttctgatggatgacaatacgttccaccagcacattgcagattatgtggcacagcttgcagcaacctataacacggtgggcacagaacgggaatttcatacaaccagtggacggacggtttatgtatacagctccgtttacggctgggcgatcgatcaggcggcggaggcagctcagcttgcccaggaaattcagtcgggaacccagacaacacgggaacccatatatgagcagacagctaattctcatggtttaaatgatcttggaaatacgtatattgaggtagatctcagcaatcagcatatgtattattatcagtcaggctctctgatttttgattcagagtttgtatccggaaatatgagctattcagacagacagactcatgcaggtatttttaccttatattccaagacaagtccttcggttctccggggagacaaaaaaccggatggaacctatgaatatgaagagcctgtagattactggatgccctttgacggcggtattggattccatgatgctccctggagagatgcgttcggaggagatatttatctgaccaacggttcgcatggctgtatcaatctcccaccggaaaatgcagcagttctgtacagcattattgactataatgtaccgatcgtatgcttttattaaagataatggaggaataacatagaaatgagcagatcttttgattttattcttgcaggagcttctctgatcgtggggattctgcttctgacaggacatggagacttttttatgaagggaggaaacgcccagcttcgcaaagccaaatatgatgagacaaaaatggcaaagggctcaggcgtggctttaatcctgatcggaattgtcaccttaattgattcctacaccacaaccgttgcggcaaagatcggatatattgtggttcttgtaattattatggcaggactgatgtggtatctgaaaaagaaatgcatgaaaaactgaactgaacgttggagtgaaataaaaaaataatcagaagaaaacggggaaactgtgatttaggattaaatcgcagtttccccgttttttaaccaaacagctttgtcagatctgcaggcctgctgatcctgtaatccggttccggcacatctccgaaaccataggaggcaaacacaaagggaataccggctttgcggcaggacagaaaatctcccatagtatcgcctacatacacagtgtctttcagatgataggtgtccataagcttcaggatcgtatcgtgtttttccagacctgtatcaccgaagcacagatgtcctctgaaatattttccgagccctgaagatttcagaaatacttcaatatatcctgcctgacagttgctgacaatgtaaaggggatatttttcagaaagagctttcagagtcttttccagatcctcataaagaggggcgcaggttttcagaagagcctcgtgctccgcctggcagcaggcatctatgatccgaagctgttctgcttctgttttgtccggtaataactgagctgcaatagccggaagcggctggccgaaaagtcccatcagtctttcggctgtgattgttatattcatatgttctttattgtgcaggtactcatcccaggattctgcaacaatttccgtggaatcccacagggttccgtctacatcaaaaataatactgtccataaaattccttcctgtatgtaaatatatggtttttggatatcagatttctgttttaacagtttggattatacacagaggtgacggaaaaatcaacatgtcagcaaagaaaaaagacatttttgtatagttgaaggacagatggaaaacactgattttatttcgagtaacatagcattggaaagctttctgtagagattcaggtgtgaatttctggaaatatcagaaaaggaggaaatacaaaatgaaacgaaaagtttttatggctctggcaataggagccggctgctgtcttattacaggaaatgttctgatggcacagccttcggttcctcagtgggaatatgtagagcagacagatgatggtatgcttgtgttccgtatgggagaaattgagctgaaggttcctgaagactgggaggattcttatgtacgcaaagagaaagatggaggtgaagctttttacctgaagaattctgatgagaaagaaaaaaatgagctgttctggttaaaagacagtgaagggcttcaggctttgtgggatgaggaatacagagctcaatgggatatacaggaggacggctctgcttcagacagccagaaaacagaaggcagtagtgaggaaactcagagcgactcccaggagcaggagaatcagaattcagatgataattctgattctacaggggaacaggaaaatgtcatgagccagacagggtttaatggatgctatctttatggggaagatggaaaagaagtttatgtagaacagtctgaggatggaaactggtatgatgaaaatggggtttgctatggttccagggaagagattgatgatgcaggtgagaatggagatcctgttacaaatgaaaatggggagacctattactggaccacacaggaataagtgatttttattaattaaaattatgaaagcggatattgtaggggagcaatatccgcttttttgttaatacatattgataaggaaaatgaagatcatgaaaaacgagtatactattatgttattttgcaagtttaataaatgttgcagcattgcagatgcctgtaaccggaagcttcatgtttgtctggaatttttttacagcagccagacatccgcttccgaaggtacccggatattctactccattaggattaaatcctcgtatcagaagaagaatctggcaggctgttaccatatactgtgtttcacctgattttacataatggtttccaagggctgcttctgtggcaggaccccagacaccgtctacagccagcccggagccataatccaggttcatagctttctgtaaaaccttgattccggcctttttagtagcagcatcacgtacacctgtaatagtaagcccagcgcctacaaatttatttgcagcagtctggccctgacggatataaacatttccgcttggcggaggggttacagaagaatcgtcattcatataacgaagaacacaatcccagtttttattgtagtaacttctgatacagatttcctttccggtctgatctccagtttttccgccagtagtggtgccattttcattgatgcttgcatgaacaatctgtccattaccaatgtacattgcagtatgtgtgactgtattcagaagtacgtcaccccgttttaaaccagagccattactcagattaatgctggagcgtacatctttaaaaccacaggaaataaatactgatttcatattacctgtataggatgcaccttttgattttactggaacacctgcagcctgccatgcgctgataactgcagatgaacagtcgtagtcaggtccccagcgattgtcctggtcatatccatgtttcggattatttgcaaggtcgatcatccactgtgttgctttttcaattttacccatttgtttgtcctccttaaatgtgttgtaattgtttttgttgttcaccggcgatacaccttataaagagtgaaaaaaataaaaagtgtaaacaaaaaaaataaaaaaggcataataaaaattcccagaacacagaaatttttatatcacacctttttggaggacattttttgctgttttaaggacagtagagtaaaagtcagtgaaaaaagtatattcttattttgctgcaatacctgacagcacagttagctcttgtgtccacgatcataaatgtatacaatgtctgctacgttttttgcatgcttttcatccatagtttccatgatagagacaactttttggatgtcaggattttgtatatgggtatttttagggaaaagatcatataaaagagaatctaatcctacatcaagagcattggaaagtctgcaaagagtttctacagttgcggaatatcttccgttttcaatacggctgatctcactgacagatacaccggataattcagaaagcttttcctgcgttaagtttttttcggttcttgcatttacaaggcgtttagctaaatcaagtttcatagtattcgtcctttctttgttatagtgtagcaataaatcgacagaaaatgaaacgcatacatgacatgtgacaaggcaaaaatgacgtataaagaaaagaggaaaaattttggaagaaacaggaaatttcggggaaacttatgttatgatgtatgcattagaaacacttcataacagagggattacagtgaaagaaactgtatatgaaagcattcacaatctcaatcagtggtatgaacagtcaggaaattacaaatatcttgaactggcgctgttgcatatgcaggcgtatgccaatatgggatttgccctggatgaggctgatttgtccgtacagaaagtactggaatatacaggaaagacaaaagatgacttttttccaagaggaaacagctttggaaaaagaatcaggcttaacagagcgcaggtacgcagcatgattggaaaatggaaaccaacgaaggaacatccaatgactatcgcagaactggtagatgatattatctataaggtaaagacacactgtgagggcagatatgtgtaccggtatcagcgaaagaaagcggaagatgcagaggtatatgagttggtgatcaataagggggaatgctatttttatgatgtaaaaaattttcgtttttatacatttgttgaggagtagaaagcgtatgatacggattatgattttagatgatgaagcaatatacctggaaaaagaacgaaaaataacacacagtttttttgccagaaaaggaattgaacacagaattgaagtatttcagagctgggaatggtttattgcaggtctgaaagaagaaaggtttgatctttatattctggatatagaaatgtcggggaaaaatggtctggaagtggcaagagaaattcgcaggtattatgcagatccaacaatgatttttattaccaattatatggattatgcagtagatgcttatgaagtaaatacataccgctatattccaaagacaaaaatggaagaaaaacttcctgaggcatatgaatctcttcttcctgaacttatgaaaagagaagaacagtattatgtaatagagaaaaagggagagatagaaaagattgcatattctgatatctattacatgagaaaagaggggaaatatgttgttattgtccacagattcggagaaagtaagatccggaaatccatgattcattttcaggaagaactgaagtcaagagagtttttgtctgtagataaagggatgatggtaaatatccggcacatcatgaaagtaaaagattatgaaatctttatgcgggatggtgtgcgtattccggtgggaattacgaagtatacaggagtaaagaatgctgtggcagacttctggaggagtgaaccgtgaaaattgcattatatatactggcaacatttctggaaacaggacttggaatccacatttttgcccaggcttttccaaaaagagaatacatgggaaaaaatcagatagcagcggaagtggtattgattagtgttttaatactggttagttatatattttcagtatttttctttcatggaaaaatgaaatatatatgggaagtgctgttgggcatttgtttttgctttattttgtgtatcattactagtagaagaaaagtacagggtaaaatgaaaatagaatgggggaaatattgtttcttaagctggagtgtattattactcacatgccagtattggtgttcatattattcagatctgatgttaattgtaggaaatatttttccaatgatttttatatatgtgttttatcagtgttcagtattacaagcatacttgtgggagatttcatatctcgccagcatcagtatgacaaagattatttatatcacttatatggggatatttgaaaaaagatattttaaagaatttttcctgtatccccgacaacatacatatcaggaagttctttactggttgataattgagttggtaattttactgttgctgaaatatattcctgtgaaatttatattaaaagaaatcttcaaaaaatataaaataatagtatttatatttactattgcagaatggcaaatgcttcgtttgttggttaatagcggagtaggaagagcggaaaaaagaaattttgtgggaatattaattatgacctgcgtgggtttttttgcctcaagttttgtagtattaatttcatttagaaaaattgaaaatacagagcagaagatttttgaagttcgcaatgaaactatgcaacatcaatatcaggaattaaatgaatcttatgagcgatacaggcatctggttcacgatgaaaaacacattttgtgttatttaaaagaatgtatccatacagggaagaatcaggaagctcttgcgtttatcgaaagttctcagaagagtatagtagacagatcaagaagcttctggacaggaatcactactcttgattttatgttgaatattaaaaaacgtaaaatggacactgtgaatattgaattttcccttgatgcaaaggtttcagaaatccccatggaggatgctgactttattgttgctttggggaatcttttggataatgctattgaggcggcagaacaatgccaaaaagagaacagaaagatctggatgtctatccagaatatcaatgaaatgttcctgatgactttgaaaaacacctgtgaaacacagccagtagaaaaaaataataaatttgttacgcataagaaaaatgcagacagacatggcttaggtgtagagagcgtcaggaggattatggaaaaataccagggagaaatcagtttcgaatataaaagcggtttttttgaggtatcaattataattacacaataaaggagaaaatcaaatggaaacaaaacagaattacaatggagacattaaagcagagatggaagaacttcagaaattagagctgacagttgaattggaagaaatggcgtggtctacatgtggaggttttgttacactggtatgttgcagttaacatgtttcagaatttttgccgacaggtctttgatcttgggatcaaagacctgaaaaacaggaaagctatagatataaaaaaaacagactgtatttccggcctgattcgtcggcagacaattcaaaatattgagagaattgctgagcgtgtactgattcaggatattcacagaaaaaaagaaacgggatttcttcagggaaaaacaccagaagaacagtaccggttttatcatgaaaagtggctggattgcagagaaaacgtttataagattttaaaagagtttcctgaactcgccagactgctttttatggaaattcaatgtaattatgagctggcagatgaaatcctggagcatctggaaacagattacagtcagatcataaaaacattctgtcatggaagggactttggggatatacgtgaagtcagctttatgggagatgctcacaacagagggaaaaagactgccagagtggagatggacaatggggtcacggtgtattacaagcctcactgtctccaaaacagtcagagatatcaggagatttatgcatatctttgtaaaaaagcaggaatttcctgtatagagcagagatatttaataagagatacttacggatgggaaaaacatatagaatggcagtgctgccatactgaggaggaggtcagacgttatttttttcgcatgggaatccacttaatgctgggctatactctgggagttacagatcttcatggagaaaatgtgatggctcacggagaacatccggttattatagatctggaaacctgtccgggatatattatacaaacagaagaaagtagtgtaaggagaaaaacagaaacacttctggcaaaatcagttttacatacaggaattttacctgttctgacctggggagcaggaaaggaagcagttatactcagcgatgtaaatacaggcaaaattgtgactcctttccgggttccggcagtaaaaaaagcagaaacgtcagaaatgtatatagattatcagccggtagaatttgaaataaaagaaaatacactgaagataaatgataaaattgtaaatgcatatgaatatgcaggaaatctggaacagggatttcggtttgcgtatgaaaaagtattaacagataaagcgataacagagatgctggaagctttttatgacacaggagcccgcgtgattttgcgccatacacagcagtatagcatgtacaggtttctttcctggcatccggattatgtgggcgaaagaaagagaagagcgcagcttttacaagtaatgcacagggaaggggagacggaaacacagaaaaaaatacatgattatgaaatacaggatttgttggaaaatgatattccatgctttcatacagagggtagggaacgctgtatttacaccggagatgggaaaagtgtgaaagactattttcctgtttctccttatgagtcatggaaaatccatataaaacatttagggaaaaaagactgtcagtatcaatgcgatctgatctggctttctatgacaatgcagagaaaaaaaagaagcagtttttataaaaagtattctggaactgtgcagaaaacacagatagaaaaccagctaaaaaatatcattaactggattgtggatacagcagtcactgcggaggatggagcaggatggaccggtctgcagttttttgaaaatggtttgtggaaaatggtgcctgcaggaatgtatctttatgatggtatttgcggaattgtattgctgctgggggagtatttaaaatattttcaggatgaaaaggcaaaggatgtatttaatcttgctgtaaaaaggatgtgtatttatacacaggaactggaaatgggacaggtaaatagcagcataagaacaggagtttttgatggagaatgttctgttgtatatacttttctgcttttacatgaaattacaggggaggaaaaatatctgagctatgcagaaaaacattttgctgtcataaaaaaatatttttcacaggatgtaaattatgatcttttaagtggaaatgcaggagcagctattgcagccctgaagctgtatcagataaaaaaagaatgtgcggaatcggcagatcaatatctgaaagaggctgttgagattgaaaaaaatttatggaatcgaagacagaccatggaaaagggctgcggatggaagctttcctgtgcagaaaagccactggcgggaatggctcatggaaacagtggatttttaatgctttatactgccctgtatcagataaccggaaacagagagtatctgaaaaaaataaatttactctgtgagtatgagaacagcctgtattcagaagaaaaagaaaactggctggatctcagaagcccggaaggtgaacagaaggtaatgaatgcctggtgccatggggctcccggaattcttcttgcccgtctggagattgaaaaaataaaagaacaccaggaaacagaagaagatataaaaagagcttcacgcagtctgttttatggaaaagaggatggcaggatctgtatttgtcatggactggccgggcgtattctgattatgaagaaatatctggaacaacataaaaatcctgagttcagagaaatttataaccaaaaggttcaggaattgttttttatgctggagcagaaagatgatctgaatgcttcggaaacccggaatcctgcatttatgaatggaatatcaggagttgcatatgctttgttgaaactatatacagagatgaaataaataataaaatccgtatcagataagcctcacagaaaactgtggggcttattacattatctttcactgaaatattcagtgatcagctgttttttgatacgatttacatactggcgtgatacatgaagctgttctgcgatttcggaatcagttttatactggaaaaagaaaagagacataatttgtctgcgcattcctttttccggcaaggctttgatatagttacagatatcatagtaggattcatcaaaggaagagggagcagaaagcgtatcaatggaatcttcaatagattctgactgaggtacagataagcagcctctgcagaggaaacgatagcggttatgtacagttgtctttatataattcaggcattctgcttctgtttttgtgggggtcagatacggaagggtttccagtaatgcaatgtataattcctgcatggcatcatcatatcccatacagtaaagtttggcagcatattttttcagaagaggcgtcattcttctgcagatttcctgagtggcctgtacatcaccggttttttgtttttctattaatgatatgattgtttccataaaactacctccttgtaagtggaagtagtgaatggagaataaaacagaaactaagaaatgaaaaaatttgagaaatttaaagaaactacagatattaaattaatttacattgcaccaggtgattataagcacaggaaaaatgggaaaagagatgtgacggggaatctgaattttaatggaaaaagggaaaaacatgtgatacaatagagccacttgataacagcaacgaggttacagagatgaattacagccatacggtaaaagccagatttctggacaggcccaatcgttttgttgctcatgtggagctggacgggcagacagaaacagtgcatgtaaaaaacacaggaagatgcagggagcttctggttcccggatatgaggtgatccttgaagaagggcagaacccggcgcgaaaaaccagatatgatctgatcagcgtgtgcaaggagggccggtggatcaatatggattcccaggcgcccaataaggcggcagaggaatggcttttaaagggaggattttttccggaggatatttctgtgtacagagaaaggaaatacggaaattccaggtttgacctttatattgagtctcctgtgcgaaaagcctttatagaagttaaaggagtaacgctggaagaggataatattgtacgttttccggatgcgcctacagaaagagggataaaacatgtgcgggaactgatccggtgcatgaaagacggatatgaagcgtatcttcttctggtgatccagatgaaggacgtcaggtattttcagccaaactggaaaactcatccggaatttggaatggttctgagagaagcggcagaagcaggggtaaagcttctggcttatgactgcctggtaggagaaaattttatggagatctgcgatccggtttccatagatctggaggtgtctgatggagaatagaattcctgtatatcaggatgatccggacacatatatggaaaatatatgttctgataaggtcagtcagaatggaagcgaaaattcgtcagtattaagtgggatagtttctcctcttattattaaatggtaccgggaaaataaaaggattcttccgtggagagatcagaataacgcctattatacctgggtatcggagatcatgctccagcagaccagagtggaggcggttaagccgtattttataaggtttattacagaacttccggatccggcggctctggcttcctgtccggaaaagaagcttatgaagctgtgggaaggtctgggctattataatcgtgtgagaaatatgcaggccgcagcctgtacagttgtggaggaatatgggggaaaacttcctgaatcctatgagaagctcatgtcgttaaagggtataggaagctatacggcaggagccattgcttctattgcatatggcattgctgttcctgctgtagatggaaatgttctgagagttgtgtcaaggattactgagagcagagaagatattatgaagcagtcggttcgcaaaaaaatggagcagaccttgaaagaaatcatgccttcagactgcccgggagattttaaccaggctctgatggaactgggagctgtggtctgtgtgccgaacggccagccaaagtgcggggagtgtccggtacagaagctttgcagggcgcatctgcatgatacaacagaggaaattcctgtaaaagctcccaaaaaagcccgcagaatagaaaacagaactgtgcttgtgatccaggacggggagaggacagccatacagaaaaggccggataagggacttcttgcagggctttacgagcttcccaatgtgaaagggacactttctgcggaggaggcagtaaaagcggttgaaaaaatgaagctggagcctttgtatattgaagaactggaaccggcaaagcatattttttctcatatcgaatggagaatgaccggatacctgatccgtgtttcttctctggaaacaaacagaaattcaaaacttatttttgcagataaaaagcagtctgacaggcagtatgcaattcctgccgcatttggcgcttatgtaaagtacatgaaggaggaaacgagatgaaactgttaagtattgcgatcccctgttataattcagaggcgtatatggaaaaatgcattgattccctgctggtgggaggagaggatgtggaaatccttgtggtggatgacggatcttcagacagaaccgcagagatcgcagacgtatatgcagaaaaatatcctactattgtaaaagcgatccaccaggaaaacggcggtcacggcgaggcggtaaacgcaggaatacgcaatgccacaggtctttattttaaggtggtggacagtgacgactgggtaaatgcagaggcgtacgcgcagattctgaaaactctggaagagcttatcagaggttcagaaaccgtggatcttctgatcagcaattttgtctatgagaaacagggggcgaaacgaaaaagagttatgcagtacaggcactgtcttcctgtaaatgaggtttttggctggaataaggtacatatgcataaggggaaatatcttctgatgcactctatgatctacaggacaaaacttcttcatgactgtggactggagctgccgaagcataccttttacgtggataatatctttgcttttgagccacttgtccatgtgaaaaaaatgtattatcttgatgtgaatttttacagatattttatcggacgtgaagatcagtctgtcaatgaggctgttatgataaaaagaatcgaccagcagctccgggtaaaccgcattatggtggatgtgttccacagatgcagatgcaataatcgtcatctgagaaaatacatgctcagctacctggaaattattaccaccatttcgtccgtgatgctgatccgtgcggaaactcaggaggctctggataagaaaaaggaattgatggagtatatcagggaggaagaccgctggatctatcacagactgcgctggggaatcatgggctgcgcatccaatctgccgggcaaaggcggccgcaaaacatttattgcagcctataagctgtgccagaaattctatggatttaactgattgatttgccgggcaggatgacctggacaggatcttttgccagggaggctgtaaattttttgcagatacctgcagattctccgtctttgtgtacggcaaggggctctgagctgcgcacggtgaccgctttgcagcgaagctggtgaacaccacggaaaacagtatgttttccaaaaatagaaagaaaaagacagaagaacagagcagggcggcgcataccttctacaatgatcacatccagaaatccgtcatgggaatcagcttcagggcagaaccggaagcctccgccctcatatttatggttcataaccgcggtgagaaatactttttcataaaagtgtttttcaccgttttctgtttcaatggaaatacctacaggaggaagcagaagaagctgtttcagtcctatgagtaaataggcaaattttccaagatgaatacggttcataaattttttcagaggagagcggttggtttcatgacatacagcagcgtcaaaaccgatcccgcagcttatggcaaaacggcagctttgtccattggcagtaaattctgccacgtccataggcgtacaggcagcttctgacagaatcgcatccagcgcatccaggggattttggggaagctgcatactccggcagaaatcattgccggatccggtgggaatatagccaaaacgtacggagcgcaggctggggatcccggaaagcacttcctggatcgttccgtctcctcctacagctacaaggcagatggaagcaggtgccgcatcagaagaacatacagaagcggcaagctttacggcatgtcccggatattctgtaaaatatgctttgtagggaatatagtttttgtccagtacagactgaagctcagaccagatgcgggctccggctcctgagcgggaattggggttgataataaaatgatacatggcttcctccgaaattatttctgttatcatagcattttcgacaggaatttacaataatttaacatgggttgtaccggaaatttaacgaaaggcttttatacttgatatcaaatggaaaatccggaggtatgcagatgatctatctggtagaagatgatgaaagtattcgcgaacttgttgtatatacattaaaaagtcaggatcttgacgcaaaaggctttgcgaagccctccttattttggaaggaactggaaaaggaggttccttcgctgattcttctggacattatgcttcccgaagaggatgggatttctattctgaaaaagctgagagcaaggccggataccaggaagcttcctataatcatgctgactgcaaagggaagcgagtatgatacggttatggggctggacagcggagccgatgactatattccaaaacctttccggatgatggaactgatctcccgcattaaggctcggcttcggaggctggaagacaaaggcgctgaggaatacaggatcggaagcctttatgtatgcccgtccagacatgtggtgacagtcaacaaagagcctgtaaatcttacgctgaaagagtatgagatgctgtgtcttcttctgaaaaacagcggaatggttctttccagaacacagcttcttaatcagatctggggatatgaatttgacggggaaagccgtaccgtggatgttcatatccggactttgagacaaaagctgggcgatgcaggagatttgatcgagacagtgcgcggaatcggatataagatggggaaatagacagggcttgtcctctttgttcctcctgtgttacaattcctttgtgataagaggaaaaggtacatggatgtgcctgaaaataatatctgaaaggaacttgtatgaaatcattagtaattgcggaaaagccttctgttgcaagagatattgccagggtccttcattgcagccagaagggaaacggctgtcttgaaggaaaagattatgtagttacctgggcgctgggacatcttgtaaccctggccgatccggaggaatatgacaaaaaatatatgaaatgggagatgaatacccttcccatgatgccggatcatatgaagcttgtggtgatccgccagacaggtaaacagtacaatgcagtaaaaactcagcttttccgaaaggacataggagacattatcattgccacagacgcaggaagagagggcgagctggttgcccgctggatcctggataaatccggctgccgtaagcccatacgccgactgtggatatcctctgttacggataaggccatcaaagacggatttcacaatctgaaagacggaagagcttatgacaacctttaccgggcggcggttgcaagagcagaggcagactggctggttggaatgaatggtacaagagcgcttacctgtaagtataatgctcagctttcctgcggccgggtgcagactcccactcttgccattattgccatgcgggaggaggagatcaggagctttaagccaaaggaatattttggcattacagtcaatgcaggggatatcacctggacctggaaggacagaaagagtggaagcttccgtactttcagcagagaacgggcagaagagattatagaaaaagtaaaaggcaaagcgcttaccattacttctgtgtcaaaaaagccgaagaaaacatatgcgccgggactttatgatctgacaacgcttcagagagaagccaatcagaaatacggattttctgcaaaggaaactctgaatattatgcagcggctttatgaaaatcacaaggttcttacttatcccagaacagattccagatatatcgggaaggatgtggttccaactattaaggaaaggctgaaagcctgcggtaccggtccttaccggaaactggcaggagcgctgcttaccagaccggttcaggtaaacggaagctttgtggatgacaaaaaagtaagcgatcatcatgcaatcattccaacggagcagtttgtacagcttgattatatgacaaatgaggagcggaaaatttacgatatggtcgtgcggcgttttttaagcgttctttatccggcgtttgaatatgagcagacctccatggaggcagaggcggagggcttctgctttgcagccggcggaaaaacagtggtaagtcccggatggaaagaggtttacgagggagattaccgggacgaggatgaagatgaggagcaggatatcagggatcagagccttcctgtaagaaagcagggagaaaagcttaaaacagaaactctccgtctgaaggaagaaaaaacaaaacctcctgcaagatttacggaagccactcttcttgctgccatggaaaacccggttaagtatctgtccacaggggaccggcaggcagcaaaaacactgggagaaaccggagggcttggcacagttgcaaccagagcagatattatagaaaagctttttaaaagctttatgatggagaaaaagggaaatgaaatccatctgacttccaaggccaaacagcttctggagctggttccggaggatctgaaaaaaccggagcttacagcggactgggaaaagaagctgtctgatattgcaaaaggaagtcttcggcaggacgccttcctgagggaaatcagggaatatacctgtgagatcgtggatgagataaaaacagggagcggaaccttccgccatgataatattacaaacaaaatctgtccggactgtggcaaacggcttttggcagtaaacggcaaaaacagtaaaatgctggtgtgccaggacagagaatgcggataccgggaaactgtttccagaactaccaacgcccgctgtccaaaatgtcataaacgaatggaaatgatcgtgaagggcaaagaagaaacctttgtctgtgtctgcggatataaagaaaaattatcctctttccaggccagacgcaaaaaagagggagcgggtgtgaataagcgtgacgtgcagaaatatctgcgacagcagcagaaggaggcacaggagcctgtaaacaacgtatttgcgcaggctcttgcggggattaagctggattaatatgaattataaaggggctgcataaggcagccctgattttatattacctgatggttcagccattttcgatttttaaaccggatagtaaagattacacagcgaatggtccagtcggtaaacataccgatccatacagccataggtcccatgtggaatacgcgggccagtatcattgccagagtaacacggcacagccacatggaaagcacagaaacggtcatactgaattttacgtctccggcagcacggagcccgtaggcaggaataaatgccattacccatacaagtggctttacaatcgtgatccaggttaccatgaagatgcacatttttgcactggcaggctccatgcctccgaaatgtgtgattgggcggaccagagcatacattacaagacaggaagcagccacaatgatttctgaaataatacaaagctttttgatgtagtagaccgcctcttccctgcgaccggcgcctaaggattccccaaccacagtcataagccctacgcctacgcccattgccaggattccgttgagattttctatgatattggtcatgccctgggcggcgattgcggcagttcccataagagaaaccgtggactgaatggcaagctttccaaactggaacatgctgttttccacaccggagggaatacctatatgcaggatgcgtttaatttctttccagtcgggccggatggaaaaataatttctcagaggaatttcaaggccgggattgcgaagcttataagttactacagccatactgaatatacgggcaagcatggtagcagaggctgagccggccacaccccagtggaatacccatacaaaaacaagattcagcgcaaggttcaggacatttgcccagacagagatcagcatgggaagacggctgttttcctgagctctgagaatagatgatccgtcatcataaagggcaataaagggataggagacagcggaaaaaaagaaatagattctggcatttttcataacagccgcttccacatccccgaagatcagtttaagaacgggtctgttcagcgcaagacaaactccggcaatgatcagtgacataataaaagtgataaaaacaagctgccgtgcagcttctctggcatggttttcctttttgcagccaagataatgagagcagacaaccgttcctcctgaagcaagggcgaaaaaggcctgaacaaccagaacgttaatggagtcaacaagggaaactgcggagatggcagcagagcccagattgcttaccacaagagtatcgacggttcccataaaggaattcagaagctggtcaagggccagcgggattaaaagagcagccagttttttgttgtcaaagagtcttggctgtaccggccggacagcagctgtgtttcttctttttttcatatgagggatccttccgtaaaatactgacacatggaactgaccaaaagcgctgtcagttcttttgtatcagaatacacccgttatatctgcaaatgcaagatatccggagagattaaattgtatatttttctgtacgatattagagtgcagccttgtttacagtacccatgcgatcactgtagaaacatgggggattttgctacggcttgcagggatgaataagttgttgcaaaaaaaaatatttttcagagtatcacaggaaaatccaagaaaaggtttcaaaaaaacacaaaattctatataatatgatacaggaatcagcaggacgtaaatgaggacctgcaaagaaaggagagaaaatggaaaaattcagtttaaaaaataaaatactgattggcgtgaccctgttttccatgttttttggagcaggaaatctgatctttccgccatttctgggagcccaggcagggacacacacctggacggcgtttctgggatttgcggtcagcgcagtagggcttccgattctgggagtgatcgcagtgacaaaatcaggagggctggagcatctggcatccagagtgcatcccgggttttcttttgtatatattatgatcctgtatctggcaattggtccctgtcttgcaattcccagaactgcaagcacttccttttccatggcagtcgtgccctttatgccggacggaatttctgcagtgatcccacagcttctttattcagtagtattttttggggcagccacagctgtggccatgcatcctgagaagctgacagaatatctgggaaaaaggctgacgccgattctgctggtgctgatcattgtgctgttcgctgcaggagcagttactgcagcaggaggaagcagtgtactggatgcggcaggggcagagccggcgcagctttatgtgaaaggcgcggcagtacagggatttctggatggatatcagaccatggacactcttgctgcgttgaattttggcatgatcgtggctttaaatattcaggcaaaagggataaaaaaggaaaaggcggtagtgagggaaactatttcagcaggatggatcgccggtatcctgcttctggctgtatatggcatgctgacctatgtgggaaaaatttcggggatcacctttgccggcgcggccaatggtacagaggttctggtagatatggcaggagctctttttggaaagctgggaacggttattcttgcagtgatttttgtaattgcctgctttaatacctgtgtggggcttttcagctgctgcggagaatattttgcaggtattttcccgaaaatcggatacagaggctgggtatttgtgtttgcctttgtttccatggtgatctcaaatgtgggacttgatatgatcctgcagtattctgtacctgtattgaatgccatttatcctatggcgattcttctgattattctggcgctggtccatcggtggatgggcagattcagaagtatttatccctggactgctgctttatgtggaatcagcagtgtacttattgtgctggatcagaatgggatcatcattcccggagtgactgctctgataaaaatgcttccggcttacgaagcgggatttggatggcttctgcctacttttgtgggagcggcagcaggaatactgacagatctaataaaaaaacagacggtataaaaggaggagaaaaatgccagtttttgattttaatcatacaccggaaaagggaacagctccggaatgtacgtatactacttttttgtccggagaacctgaggcgacggcggaaaagcctattctgattttggataatcagaaaaagcagtggcctcatcattcctgtggagtatttaccaatccggttcatagaacttcttttgaatttaaagaagagagaggcgttgtcagcgcagatatacggaaaattgacgcccgctttgtaagccttatcaaatggcttggagagaatcggatcaatgtacgcctttccggagaaaaccgtccggaaggatactgtgtttaccgaatccgtgagatcgccttcggaggaggaacaaagctttcagcagaggacggtttccttcagtttatgattgaacgtctttttgccagcagcgcgcctgcggagactgcctcagatgaggaagaggcagaggatggagatgagatgaagcttaccagtattcagagtattacggattttatgacctgcgcaggccgtactctgcctgataatatccgtctctgggcaagaagaaatcttgcagtggcccgttccgcagaggtttctcaggaggaacgccgccatgcacagagagccctttccattatgatgaatattcagtggaaaaataattattttgagtccattgacccgaaagaagccagaagaatcctggacgaaaccctttacggaatggaaaaggtaaagcagcgcattattgagacgattattcagatcaaccgtacccatacccttccggcctacggacttcttcttgtgggacctgcgggaacaggtaaatctcagattgcctatgcggtggcaaaaatcctgaagctgccgtggacaactcttgatatgagttccatcaacgaccctgagcagcttaccggaagttcaagggtttatgcaaatgcaaagccgggaattatcctggaggcgttttccatggccggggagtcgaatcttgtgtttattatcaacgagcttgacaaggctgcagcaggaaagggaaacggaaatccggcggacgtacttctgacccttctggacaatcttggatttacagataactatatggaatgtatggttcccacatccggcgtttatcccattgcaacagccaatgacaaatctcagatcagcgctcctttaatgtcccgttttgcagtgatcgagattccggattacacaccggaagagaaaaaagtgattttttccaaatttgcacttcccaaagtcttaaagagaatggggctggaacaggatgagtgtattatagaaggtgaagcccttgacgcagtgatcgagagatatgcggatacttcaggaatccgcgatctggagcaggcggcagagcatctggcagccaacgctctttaccggatcgaggtggatcatgtgaagcaggtggtatttacttcagagatggtgaaggaactgcttgaataagttttgcttagtacacggggaaaaaaccatagaagacttaaataagaatttttcgttgcatttcttttcttcatctgctatactggcatcagtatctggaaaatcatttccggagctgatgcttattttaattgaataaactggttcgaaaccctcccagtataaaaaactaggttctttcaggtatctttcttttgatgatgcctttttctgcggaggattttacttttatggaaaaagctgtcgaaaggaggatttttttatgtgcagaattgtaattgactgtgatccgggaattgacgattcccttgcccttatgctggctcttgcttcgccggagcttaatattgcggggatcacaactgtttccggaaatgttcctgttgatatgggaacggagaatgctgcaaaggtactgaactggatggagcggacggacatccctatctataaaggtgaggcggttcctttgaagcggaaatatattgatgccatggacactcacgggagggacggcatgggagaaagcttttatcctgcagtttcttatccgaagcaggataaggatgccgtacagtttctggaagaacttctggaaaaggaaaaaatatccattattgctcttggtcctatgacaaatctggcaaagctgtttctgaaacgccctgatcttatgggacaggtggaggaacttgtttctatgggaggaagtttcaaaagccacggaaactgttctccggttgcagaatataattactggtgcgaccctcatggagcagcagcatgctatgacgcttttgcaaaggccggcaaaaaaatccacatgatcggacttgacgtaacccgaaagatcgtcctgacgccgaatattctggaatatatctgtcggcttgatccgaaaacaggagagtttatccgcaggatcacaggtttttatatggattttcactgggaatacgagggtatcattggctgtgtgatcaatgatcctctggctgtagcgtattttacagacagggatatgtgttctggttttgacagctttacggcagtggagacagagggaatcagcattggacagacagtggtagattctatgaatttctggaaaaaagaaccgaacagccatattcttacagaaactgacggaaagcaatttatgaagcttttcctttcaagaattttgaaaaaaaatgatggaagcagatacagagaagaagaactggatcttctggatgaattgtaggaggatgaaagtatgaaaattgaaaacaaaaaaataactacttatcagatttgtcttgtggcgctggctgtgggcgttaatattgtaggaggacagatcgcattgttcttgaagcttcccgtatatttggacagtattggaacaatttttgcaggcgcggttctgggaccgtggtttggaatgatccccaatattttaagcggtatttttatgggaatgactgtagatatttactctttgtattttgctcctgtaggaattgtgacaggatttttaagtggccttgtatttcagaaaatgtcagtaaaaaaaggcaggattttcctggctgcagctgtgatctcagttccggggaccattgtgagcgctttgatcaatgcggttttatttggaggggtaacctcatcagggtcatctattcttgtacagatgctttccaaaacacctctgggactgacaggaagtatttttacagttcagtttctcacagactatgctgacagatgtatttctgtttttgccgtaagcgcgttgataacggcaatgggcggaggaatggtagcaaagctttcaggaaggataaataataatggaacgatatagcagaataacagataaaaataaaagagagatcgtacttctcagagcatttccctgcgtgtggggaaaatgtaccttctgtgattacattgaggataacggaagggacgaggcggaaatggtcagagaaaaccgggaagctttaagggaaatcactggagagtttggcgttcttgaagtgatcaactcaggaagctgttttgaacttccaaaggaaacgctggaggatatccgcacagtagtccggctgaaaaatataaaaagactgatttttgaaagtcattggatctatcgtaaacgacttcaggaaatgcgggattattttggaattcctgttacctacaagatgggtgtggagacctttgattatgatttccgggaaaaggttctgaacaaacatgcggacttcaagacacctatggaggctgcggaatactttgattcgatctgcctgatggttggaatccagggacagacaaaggaaatgatccgaaatgatatcgcctggttaaaaaaatattttaatcatggaacggtaaatgtttttaataataattccactcccatcaagagagacgaggagcttgtgcgctggtttatggaagagtatcagtggcttctggatgatcctgatgtggaagtgctgtatgagattactgattttggcgtaggctgaaaaaggctttcaggtgaatatcacatgtccgggaaggaaaacacaaaaactgtattgctttatttatagcagaaaatgataaaattccggtggaagttattcgtacatcttacagagaaaagatttttttgtaagatacacgaagcttccgccggaatttttatttgagtgttacaggaataggcgcaactgtactatttaaaatacagtcccattcatagttttttgggcagtattgcaaacaaggactgtgctgacgataaagcgtataaaaatatgggacagttcagcacatttgataaaactgagggaaaagaggcttcagtttaattttgctgataagttctcaggaagtcggcaatatttctggctgctttttccagaacctctacacggggcagatatacaacacggaaatgatccggttccttccagttaaagccgccgccgtggatcagaaggatttttttctcacggagaagatccagggcaaatttttcatcatctgtgatgttgaattttttcgtatcaattttcgggaaaatataaaatgctgccttgggttttgctgcagtgattcccgggatgtctgtaagggctttgtaaataaattctctttgttcataaatccttccgccgggaataatataatcatttacactctgatgtccgccaagtgcagtctgtacaatagactgagccggtacattggagcacagacgcatattggatagcatattgattccctcaatataatcctttacatgttttttgttgccgcttaagatcatccagccaatacgatagcctgcgatcatatgagacttggaaagaccgctgaaggtaacacagaaaagatccggcgcaagggaagcaatcgaaatatgcttttctccgtccataacaaggcggtcataaatttcatcagaaaaaataataagctgatgacgtcttgcaatatcaacaattttctgaaggatctcctcaggataaagggcgcctgtagggttattgggattgatgataacaatcgcttttgtccggtcagtgatctttttttcaatatcgtcaagatccggataccattcggactgttcatcgcagatatagtggaccgcttttcctcctgccagagtggcgcaggctgtccacagcggatagtcaggagaaggaatcaggatttcatctccattgtccagaagtgcggacatggaaagattgatcagctcgctgacgccgttgcccgtatagatatctccaatagaaacattgggaatatgctttaactgcgcatactgcataatggcttttcttgcggaaaaaagtcctttggcatcagagtagccttcgcattcggtaagctgctgacgcatatcgtaaataacctcatccggtgtgcggaacccgaaaggagccgggtttccgatatttaatttcagaacgtgagtgccggcctcctccattcttccggcctcttctacaacgggacctcttacatcgtataaaacattgtcaagctttgaagattttttaaattcgcgcattgttattcctcctgtagagtatgtgtttgttccggctgaaccagattcagaccgggatggttcagaataagcagctgatgaagccgggggggccacagctgattcggcagtctgtgaaaaagcggatttttttctggcatctgtctgaaatccggcagtactgaattcggaaaaggcgctgtcctgatcgtgacccagcagccattctgaatcggtgtggagagtctgtgccagaaaattcaggatatctgtgcggggaacagtttttccactgacatactggctgacatggcttttgccaagcttcactcctgcagaagcagcagcccggaccagatccacctgtttcatattctgtttttccattgcagcccggagtctgtcggcaaacgattcttttggcatggtctgtacctcctggaaaatacaaaagttcaattttagcttgtgatatataaagttcaatttgataaagagagtatatcacagagagttcaaaagttcaatataaaagtagagaatcagatagtgggcatgagggggggatgtatcataaaaacataaaaagaagtttttgattttttaataaaggcacattaaaaaagtaagtgaaaaataaaaacctacttgtattttcacataaacagcgttataatatgaattaccgacatatgtcgataatgaaaacgaggtgatttcatggcaaggccaacaagatgcaggcgaatatgtgcggaaccggcgtatgacagtttcattccggagggaatcagcactggagagagaaccggtctgacacttgatgaatatgaagcaattcgcctgatcgatcttcagaaatgtacacatgaacaatgtgccagacagatggatatttcaagaactacagtgacagaactgtatgaatctgcccgctataagattgcagacagtatagtgaacggcaaggcgcttgagatttccggaggtaattatcggttttgtgacggtacggcagatttttgctgcaatacagattgtggaaggtctgaagagaccggctgtgaatcaattataaggatgaaaggggaatttacaatgagaatcgcagtaacttacgaaaatggacagatttttcagcattttggacacacagagcagtttaaactttatgatgttgaggacggtaaagtaacaggaagtcaggtagttgacactaatggacagggacatggcgcgctggccggttttcttactcaggcaaaggttgacgccctgatctgcggcggaattggcggaggcgctcagaatgcactggcagaaatgggaattaaacttttcggaggtgtttccggatcagcagacgaggctgtagaggcttatcttgctggaaatcttaattacaacccggcagttcactgctctcaccatgagcatgaacattcctgtggagaacatcattgtggagaaaacaaacacggatgttccggtaactaaacaaaataaatatcagacagaaaaggaccttgggatctgacgaaccctgggtccttatttttatgagaagatttttttcgcagtctttttttaacatttttactcgtttctgagtttataatcccagaatttaatttgaatatatttattatacgaaacacgtaacgataatttatagaaaaaatgttatttttttaacaaaataaaaataattaactaaatttaacgaaaataaaaacactatatttgtgtaaaatatataatttacgaaacaaagttacgtaaataaaatattcaataaagatacagaaaataaataaaatcaactaaaaatattgcagaaaggcggtaaactatgagaataggatatacaggatggacatggatttctaatgaaagagataattggaacccgattaatgagcgtcacaaagaaaattttgaacagtttttgaaagaggtttcagatttaggatacgaaacagtagagaattttaactggattgcagattattattcagatgatatagaaggctttaaaaatgtggttcagaaatacaacttaaaatttgagaatttgtatttttattttagtgataatccggataaagattatgaagaagccaaaaaatatctggaatttatgaaggccgtagatgctcattatatgaatatgcaaggggtaatgtggacagatacaccgtttcagcgtcccacaaataaagaacagattttaagctatgcacgtctgtctgataaaattggaagattatgtaaagaatatggagtaaaagcatgtatgcatccacatgctaatacagcagtatttacaaaagagcaaatagatctttatatggaaaatacaaaccccgaatatgtttttctgtgtattgacacagcacacacgacactggcgggtattgacgcaccagagttagttagggaatatggaaagagaattggttatatgcatttaaaggatattgatccagatgaaacattaaatactgaatggccaatgaagagatttcgaccgcttggatgcggatgtgtaaattttaaaggtgttgttaatgaactgagaaatgcaggatatgacgatattctttgtgtagaattagactatcagccagtatgtaattatcgctctgctcaaataagcagagaatatattcataatgtacttggattgtaagtggaacaggagggagtaatgtccggacgaataacaatggaggaaattgcaagactggcaggagtatcaaaggcgactgtgtccagagtggtaaatggaaaagaaggagttggtgatgcgaaacgtacacaaatccaaaatcttctggaagaacttaaatatgacatggactccaatttacctgttatggcagccagaatgagactaaagacagttgcgctgatcattccggacattaccaatccattttttggagaaatggctcgagccataggaacaaggatgaatgaaaaagggtattcactacttttaggtgacagtcttttttcaacagagatggaaggaaaatggattagggattttgtttcaaaaaaagttgatggaattataatagcacctgtaggagataagccttctaaagattttggactgatggataaatttcatattccgtgtgtttttttggacaattatttggaaggagtgccaaacaaagggattgttactacagataatgaactggcagtatatatggcctgtgaacatttttttaatagtggtgtaaaaaaaatagcgtttatcagtggaaagggaaagagccgagtagcgggggacagattgaaaggatacagaacagcaatgactcagtttggtattccttttgaaaaggaactggtaagggcaggggactatactgtaagcagtggttataaggcaattttagaaatggaaagcgcaggacttgattattcggctgttatttgtgctaatgatttgatggctcttggcgctataaatgcattgaaagaattatcgtacaggattccagaggatgtgcaggtgattggttatgacaatatgttcttttctcaatatattaccccggcattaagcacgatccagcatccaatcatagaaatggggagaattgcagcagatttcatgcttcaggcattggaagataaatcagaggcatatccatttgtaaaattgaaaacaagacttttactgagacaaacaaccagataaggagtaaagagaaatgagaaaaacaggattattaaatacagcgataatcaaagaaatttctgcgataggacatacacagtatcttataatcggtgatgcaggtctgcctattccaaaagatacactactaattgatttggcattaaaatccggagttccttcttttttagaaacagcagaagcggttttagatgaaatggttgtagaacattgctatttggcagacgagataaaagagaaaaacaagaaattaaatactgaaatagggaagttgacggaaaatatagcgtgtgattatatcatgcatgaagaattgaaaaaaatgtcagaatatgctcgggtgattatacggacaggagagacctctccgtttgccaatattgttcttgtggcaggcgtcaatttctgaagctaagaagataggagaagtaaatatgggattatcacagacgagtgcagtatttgtgcttttgtttgttacatttttatgggggtcatggtttcaggcagtaaaacatacagggaattatccgatttatgtatttttgaactggatgtatttattttctgttgtaattgtatggggcgctatttttatatttgaagataaaatgattccggatggtgtttttaatgaaatagcatcagaccctggaagagttgctcttgtgtttttatgtggagctgtttatgcggttggaatgcagatccagctatctgctgtaagcagagtaggattaatcttatctagctccataacatctacatgttctattttaagtggtgtgattgtttcggcaattcttggcggtgttcccgagggagcctcattgacaatgataatgatgtctgccgttttattaatcggaggaactgttgtctgccagatttccggcactatgcgtgataaagatataaaaaaaggggaaaataaaaaaacaccattagcaacaaaaaaacaggatattatcttactgatttttgcatcaggaattttacagccctttttttcaattgcatcatcggtagggcttaaaacagatttgagaccggaaggtttttcttcttttacatgtatgggaatactttgtctgggggcttttgtcggtacagctggattttctgctattgtggtaacaaaggagaagatgtggaaaaaagttatacatccagatgtaaaaataggagtgattattggcatggcagtaatttctgcattctgtcattttggaggaaatcttttaaatgcaatagctgcaccagttgtcagtattgtaattgctaccggtattggatattcctttggaatatggtcatatctttgggggattgtatatggcgaattttccggagcaaaaaagaaaactttaggtgttcttggatgtggactggcattttttattgtcggcatcgttattttgacacttaatattacataacagaatccaaaaaaagaaggaggtctataaataaaaagagggaatctgttgtgtataaaacaaaataatatttataaataaaaggagaaggtatttatgaagaaaagagtattagggattttgggtttggcagctttaacactggtatcaatgattgcgcctgcaaatagggtatatgcaaaagaggaagaaaatttaaaaatcggacttagttttgtttcactgaattttccatattatgtgagaatgtatgacacttttatggaagaagctgaaaaaaataactgggaggtttcttttgtagacggaaatcttgatgcaacgacacagttaaatggaatccaggatttagtaaatgatgatgtagatgtaatggtaatcagtacctggtacattgatgcaatggaagatgttttacaacagtgtgtggacaaagatataccggtttttgtaatcggaaatactgagaatccagataatattaatgaactgattcaatatgcatgcggtacagagcactatgatgcaggtcatcttggtggtacatatatgtcaaaatatttaaaggatcagggcagagattctataaagatggcaacaatggtgggttctactgagcagatgaaagcaagagcgcagggatttgtagatggaatgacagatcatggcatttcggttgaggtgctgaatgagtatgatgtttccaccagagaagaggcaatggcaagtggcgaggatgctttgactacatatccggatattgaactgttttatggagtaagtgcccagggagctttgggagcatatgatgcaactgttggagcaaacaggacagaggttatggtttttggatatgatggagaggatgaagaactggaagttatagatgaagacaacaactatgtaggtacagttactcaggctccggatgtggaggcttctactacagtagagtatattaagaaatatctggatggagaagaatttgataaaatagttccgatttctgcagggatttattgtgatgaaggtcagttgactgcagaagaagtggaggagtcagctaagtaaacgtctgcatttgagtgatgcggaaaggtgggtttaatgggaactgcgacagagactatattagaactgagaaaaataaacaaggcatttccaggagtaaaggcattaacagatgtggagcttatgctgaaaaaaggtgaggtactggcacttgtaggagaaaatggtgcggggaaatccactttgatgaaaatcctgtctggcgcatataagaaagatagtggctctattatttttgatgggaaagaagtggagatacagtctcctattcattcagaggaactggggattgcaatcatatatcaggaactgaatctgatacagagaattaccgtagcagaaaatgtttatctgggaagatatccggagcataatggtgtgatacagtggaaacaaatgtatgaagactcacagaagctgatcaatgagctgggaattaatatagatgttcataaaatgctcagagaaatgagcctggctgagcagcagttaatagaaattgtaaaagctgtaagtaccaatgcgaaggtagtgatcatggatgaaccgacatcatcattatctcaaagtgaaacagagctcctttttgacatcattcgaaagctaaaagagaaaggaacatctattatttttatcacgcacagattagatgaaatctatgcagtctgtgacagaatgacaattttgagggatggctgctatattggatcaagagatgtcaaagatgtaactaaaaatgaaatgattgaaatgatgattggaagaaagctgaccaatcagtatccttcccgggaatctgtgattggagaaacggtattagaagtaaaaaatatttcggatggtggaaaaagagtcaagaatgtgtcatttcaggctcattctggtgaagtattaggatttgcaggactggttggagccggaagaacagaaactatgaggatgatatttggagcagataaaaagatatctggcgaaattttcattcggggaaaagctgtggatattcgaagtccgagagatgccattcgcaatggtataggatttgtaacagaaaacagaaaagaagaaggactgtttttgagatcttcgataaaagtaaatacagttatggtagctttaaaaaagattttaaaagcaggattgtactttgactttaaaaaagaaaaggcttatgcggaggaatatgtaaagaaacttcatacagcaacatcttctgtaaataaaagagttatgtttttaagtggaggaaaccagcaaaaagttgttttggcaaagtggttgctttctgatgcagatattattattcttgatgaaccaacaagaggaattgatgtaggggctaaaagagaaatatacgagattatcaatgaattggtagcagaaaagaaagttgttattgttgtatcatcggacatggaggaggtaattggtatctgcgatcgtatcattgtaatgcatgaaggtgtgatttcaggagaggttttaaaagaaagtttttcgcaaagtacaataggacaactttctgtaggaggctgaggatggataaagcaaataaaaatataaaggaaaagcttggaactattgcgaatggaatgggagcgtggctgatcattctgatactgattgttgtaatgacacttataaatgataagttctttacagtaagtaattttattaacgtatttcgtcaggtgtgtgtggttggaatctgtgcgttaggtgtttcttttgtagttttgggtggagaaattgacctgagcagcggtatgagtgcaacatttgcgggatgtaatgcagctcttttgattaccaaatgtaatatgccggtgtggctggcaattctgattgctgttgcgattggaagtctggtaggtctcgtttcaggatttattgttacatactggaaaattccgtcttttattggaacacttggaatgcaatatgttgtacagggatttattttaattacaacaaacagtatgccagttaccggacttccggatagctttctatatctgggaagaggatatattgccaatgtaattccagtgcctgtagtaattatgttgattttctttatcataggagcatttttattaaaatatactccttttggcagatcggttatagcagtaggcgaaaatccggaagcagcagcgctttcaggtcttaaagtaaaaatgacaaaaatgctgatgtttacgttgggaggattttgtgccgcatgtgcaggaattgtaatgacagcgcgtctgtcttccggacagccaagctcaggcagtgatctttctcttcaggcattggcagcagtgtatattggtggaacttttaatggcagtatgtttaatactcttgcaggcgctcttgtatggggatttattaataacagcttgaaccttctgggagtaagtgcatactggcaaaaagtagtattaggaggaatcattattctggcagtacttttagatacaatcagggcaaaagtatctgtaaaaaaacagtaagaaaattttcggaatatttcaaaattacgtaaaaagaatgattatggggaatttattcaaggaggtatttaaatgaaagtaaatggagtatatgtaaaagactatatgaagcttgatgttatgcagcatgaaattcctaatgagccagggccaaatgaagttttggttaaaacaatggcatgtggtgtttgctgttgggattcctggctatacagaggtgtaaatgcaccgggaccttatccttatgttattggacatgaaggggctggcattgtcgaaaaagtaggctctgaggttgataatctgaaaccaggagacaaggtgtttgcagcatatggcggaaacgatatgatgagtgagtattttattaatcgtaaagatggtgtagtaaagctttcggatgaagtgaaagattgggcttccgtgatttatgagccggcatgctgcgtaattaatgttgtaaattctctggatattcagctgggggatcatgttgtgctggtaggggctggatatatgggattacagaccctgcaggttcttacaaagggaagtcaggcaggaaggattactgtatttgaactgagagatgatcgcagaagaatggcagaggcgatgaacccaacagaggttgctgatccagaaagcgaagaaggaaagaaattgattgaagatattataaaggcaggaggtgcagatgttgttattgattttggagcaactacatcaggatttgagcttgcggattctctgactaaacaggcaggaaaacttggaattgcaactttccacaggggagatgttacatttaatggtacaaaatggcatcttggaggattgaaagtttacaatctttctccttttagtaatgcgcattatccagaacttcttccaaaagcatatgaaatgattagaaagcgcgttttagctccggaagagtatgtaacacacacagcatattataaagatcttgaagcaatggaaaatcttttccaaagagcgtgtgataaagaagataattatatgaaaggtgttgtgttgtttacaaaggaatgaaaagagaggggacaatatgagtggtaaatttccaacgaccaggataggagatcttgaactgccaaggctggttataggatgtaattgggtatctgggtggagtcatagaactcctgcaaaggataacatgattttagctacgcataataatcctgagagtgtgtcaaacatttttaagacttttcttaatgaagacatcaatgctgtacttggactttttggaattgatcatgatcttatagatgcagtacatatgtcagaagcagcaacaggaaaaaaaatgactatactggatacagtggtaattaatgtggatgataatagagcggcgagaaaagaagcggaaaaagtaattaaggaaagtgctaaaagaggtgcgaagatatgcctgccaattcattcctgcgtagagcagctgattaataagaataagggaacaattgatcggctgccggattatttatatatgataagagaaaatggaatgattcccggattatccgctcatatgccggaagtaatccagtatgcagatgaaaatgattatgatgtggaaacatatatacagatttttaactgcatgggatttttgatgcaggtagaaattgaaagtgttgctaaaatcattcacaatgccagaaagccagttcttactataaaaccatgtgcagctggaagaacaactccatatgtgggacttaattttacatataatacaatcagggaacaggacttggtatgcattggatgttttacgccagaagaagcattggaggatattgaatatgccagagccgcaatagaaaggcgactgcctcagattggagcaagacaaagtccttttaataccagtgtagtaaaaggaacagtgaattaaaaaaatgaagtgtaaaaggcagtagaattagaaatgaaaattctgctgcttttttatgaaaaggaggcaaacgaaaatgaaagtattgaattttggatcattaaatgtagattatgtatattctgttgaccatatgattattggaggagaaactcagctggcagaaaaaatggaggctttttgcgggggaaagggcctgaatcagtctgtagcacttgctagagctgggattacagtatatcatgcaggaataaccggaaatgacggagatatgttggtggaagtatgtaaagagaacaaaattgatacttcttatctgaaatatatgcctgtaaagggaggtcatacaattattcaggtagataaagatgctcagaatagtattattctttatggtggaacaaatcagatgcttaccagggagtttattgattcggttctcagtaatttcgagaagggagattatattgtattacagaacgaagtgaatttattagattatattatagaacaggcttttgaaaaaggaatgaaaattgttttaaatccagcgccttataatgaaaagatagaagaatgcgaccttagaaaggttaagactcttatattaaatgaaattgaaggaaatcagtgtacaggtgaaaaggaaccggaaaaaatattgcatgttttaaatcaaaaatatccagaaacagaaattgtgttgacaatgggaagtgatggagctttttattatgatggagtaaggagaatttttcaaagtgtttttgaaactcatgctgtagatactacagctgccggggatacgttcacggggtattatctggcatcagtaattaagggacagactgtggaagacgctttaaggatagcggcacgggcagccgcaatggctgtttcacgtgcgggagcgattccgtctattccagtgcttgaggaagtaataagaattttataaattaacaaagtgtaaaagataaaatctttctttacagatgactctgtttcgtatagtatgataatacaaaaaatgggaggagttatatctgaatgagaaagatagataaaaatttttgtgcgtggatgatggcgggggctcttgctgtgggaactttatccgggggatggactgccccggctcaggtgtgggcagcctccgaaaaaaaggaagagaaacagaaaacagacgaaaaagcacaggagcagcagacggaggctgacgctgagggaacggtgagtccttcggattatgttcttcagccacaggaaagctattcttatgcggacatgggactgtcctttcagcttccggaggaacttctgaagaaaatggaaagcaaagaggtggttatgcttccggatgcagagcttacggaggatggcagtaaactgaaatacgggcaggtaagctggagcactatgacggaagagcagagagaggcggaggttgataaatcgggagacggatatgcacagtggaaagaagggctttcacgaataggcgctctcggaacctatcataaagacctggaaaaaaagctggacgagcttaccggctgtacagagcatgaaaaaataggtgtcagtgaggatggagattatatttattatctcagtatgaataaagatgcagataaagatctgactgcatccctgaaaaaaatagaaacagaaataaccagaatggtttcttataatgaagaagaaatgggagaaggcgactctgtgggaagctttaccacagaggatattaacggagaagagtatacagaagctgttttccaggaggcagattttaccatggtcaatgtatttgctacctggtgcggtccatgcgtgaatgaaattccttatctggcggagcttgatgaaaagatgaaggacaaaggggttcaggtgatcggcattgtaatggatgcggtaaagggaaccgaaaaagatgaagaggggattaaaaaggctcagatccttgcagagaagacaaaggcagaatatccgttccttcttccggactccggatatatgaacggacgtctggcttatgtacaggcatttccggaaacattttttgtggacaaaaacggcaatattgtaggagaaacctacagtggaagccgcagtctggaagagtgggaagaaattgtaaatacggagctggaaggtcttaaggcagatcaggagaaggaagatggagagaaaaaataaaaaacagtctttttctgcgagaatttcagagagaacagctttttttctgggcattgtcattctgatcctgggagccgcgtttatgatattcggcatctggcggggagaaatggcggttgtttttgaaaaggcagtaaatatatgcatggagtgtattggcattggataagaaaaaacgtacaaacgaatggggacgccacagagtacagatcctctgggctttcctgacaaacagctatctggtgggtcttgcaaaaggaaaaatctatcagggaaaacttaaaaatctctgtgttccgggactgaactgttattcctgtcccggggctctgggggcctgtcccataggggcgatgcaggcggtggtgggaagctggaattttaaactggcgttttatgtggctggtttcctgatgtttgtgggagcgcttctcggcagatttgtatgcggctggctttgtccctttgggctgatccaggatctgcttcacaaaattccctttccaaaaaaaatcagcaccttccggggagacaggcttcttcgtaagctgaagtatgtgatctttattgtttttgtgattttgatgcccatgtttgtggtggatcttctggggcagggggcgccgtttttctgcaagctgatctgtccggcaggaactctggagggcggcgttcctctggtgcttcttaatcagggaatgcggagcgcaataggatggctttatgcatggaaaaatctgcttctggcagtgatcattattctttctgtcattatttaccggccgttctgtaaatatatctgccctttgggagcagtgtattcattgtttcagccgatttctgtattccgatacagagtggatcaggaagcctgtacacactgcggagcctgcgcaaagatatgcaaaatgcaggtggatccctcaaaaagcccgaatcatatggagtgtatccgctgcggtcagtgtataaaagtatgccccacatcggcaataacttctaatatcagaagaaataaaaaacaataatcaggggaagaaggtttaagttcggttcctgttacagaatcagagtgtctgagaagggcactctttttattttagaacacgatacataaaaactgttgtctttgttctacagaacaaggctcagatgtgctataatagtctggagaaagctggttgccggaaattctcagaaactttttactgaacataaaaaatacaggagtgtgatttatgggaaaacaaagaacaaaccaaccgaggcgaaagaagaaaaagaaaggagatctgctgctgaccctggctctgatcgctgcaattgcggtattttgctttgcagcatataatctgtttcatatttatacagagtacaaaaaaggaacagatgagtacaaccatattgagcagatggcagtaacagaccgagctccggaagacgaagaactggtggatgcggtttcggaaccaaaaccgccgatatcggtggattttgatacgctgaaaagtgtaaatccggatgtggtaggctggatctatatagaagctttggataatatcaattatcctgtggtacagggggatgataatgaaacctatcttcataccacatacgaaaacaattacaactttgcaggaacaatttttgtggactatgagaacagtagtgacttcagtgactgcaacacattaatatatggtcacaatatgaaaaacggttccatgtttggaaatctgaaaaaatttacagaggatcagtccacctatgaaaaaagtaaatatttctggatccttaccccggaaaagaattaccgctatgaaattatttctgcatatacaacaggagtaaacagtgatacctataccctgtttaagggaccgggggaagaatacctgaattacctgaatacgattcagggatattcagagattaaaacagaagccactgagcttacggtcaaggacaaaattgttacactttccacctgtacaggaaatgaagcgaccagatttgttgtgcagggaaaacaggtgaatgcagaaccggcaggctgaacaggcagaagggaaggcgaaagctatgcagaacagtattgaaaaactgcaggaaatagtagacagatacgagaatcttgtattttttggcggcgcaggtgtttccacagagagcggtataccggattttcgatctgtagatggtctttataatcagaaatatgattttccgccggaaacgattttaagtcatacgttttttatgagacgtccggaagaattttataaattttacagagataaaatgctttgtgattcagcaaagccaaatggagcgcatctgaagctggcagagcttgaaaaagccggcaagctgaaagcggtgatcacacagaatatagataatcttcatcagatggcaggaagcagaagagttatggagcttcacggaagcgtgtatcggaattactgtatgaaatgtggaaaattttatgatttttcttacataaaaaacagcaccggcgtgcctcactgtgaatgtggggggatcgtcaagccggatgtagtgctttatgaggaaggccttgatcagcagaccctgacagattctgtgcgtgcaatttcccaggcgcaggttttgatcataggaggtacgtctcttgccgtttatccggctgccagcctgatcgattatttcaggggagaatgtctgattgtgatcaataaggctcccacaccaagagaccgcagcgcggatcttctgatcaaagagccgattggacaggttttttcacagatcaaagtaaaaggagaatagcagatgggttatatctatgaggtaggagatgttgtgacactgaaaaaaggtcatccctgcggaagcagagactgggagatcctgcgtgtaggtgcggatttcagactgaagtgtatcggctgcggacatcagatcatggttccccgtaaaatggtggaaaaaaatacaaaaaatctgaaaaaagcagaaccgggcagttgataaggagccattggatgaaaggaggctgaatttaatgtggaataaaattaacaggatcttaaaaggacagcttgtaacctcacttctgtacacgctccttggtctgtgctttgtgctgatgcctgtggacgcggtaaatgcaatctgtaaatttgtgtttgggattcttctgatactggcaggaatttaccatattctgatctatgtgctggagaaaatgaacgccacacttctggatctgctttcagggggaatgcttctggtgatcgggatctttcttttttacaatccgcagatcgtgattaagcttcttccggttctccttggaacctttgtgcttgtagattccgtgtgggtactgaaaggaagcctgcgcctgaaaaaagcaggaagaggggaatggaaaattcttctgatcggaagtcttatttttataggatttggtattgccatggttattaatccctttaccatgatcaaatatacagtgatttttgctggatgtgtaatgctggcaaacggtgtggtggattttgtatttcttgtactgatccgccggggaatgaaaaaggctgaagaggctgtggaagaagctgtggagcagatgaaggaagctgagataaaagcagaagaatcggaagccggcagagagacagaaatggaaccggagtatactgcatggagtgaccgaagaacagttttagaacagaaatcagaaaaaaaggatgagcaggaagatccggaaacagcaggtttcaggcaggaagatccagaaccggttgtttcagatgcagaagaatattacagaaaacaggcagaaaaagaatcagaagaggaatgatctgatacagaaatattgatatttttaaatatcatgaaaaacaaacatatttcttgaatttttatcatggaagaattgtattctcaattctataataaaagcaggttaaatcaaacgggtaacatgtttagctgtattttatagaaaaggagaggatatcacatgaaaatgaaaaaacttacagcaatgggtatggctgcactgatggcagcaacaatgattccggcagttcctgttatggcagaaggcgaaggaaaagtatattacctgaactttaaaccagaggctgatgaagcatggcagaatctggcaaaagcttacacagaagaaacaggaacagaggtaacagttgttacagcagcatccggtcagtacgagacaacacttcagtctgaaatggcaaaaagtgatgctcctactcttttccaggtaaacggtcctgttggtcttaaaaactggaaggattactgctatgatctgaaggattctgaaatttattctcagcttacttctgatgcctatgcgctgaaggacggagagagcgtaccgggaatcgcttatgtaattgaatcctatggcctgatcgtaaacaaaactcttcttgaaaaagcaggctatacacttgatgatattaagagctatgatcagttaaagacggttgcagatgatatccagagtaaaaaagatgaactgggaattaaaggcgcctttacttccgcaggtatggatgcttcctctgactggagatttaagacacatcttgcaaaccttccgatttattatgaatataaagacgagggcgtggatgacgcagctgaactgaaaggtacttaccttgaaaactacaagaatctgtttgatctttacattacagattccacctgtgatcctgcagagctttccgctaaaacagcagacgactccagaaatgagtttgtaaacagcgaagcagtattttatcagaatggctcctgggagtatgcagagcttgcaaaaaccttcagcgatgaagagcttgcaatgattccgatctactttggtgtggatgatgaaaatcagggtcttgctacaggtacagagaactactggtgcgtaaataaaaatgcttctgaagaagatattcaggcaactcttgattttatgaactggtgtgtaacttctgagacaggtacaaaatccatggcagaagatatgggattcacaattcctttcaaaacagcagttgctcctaccaatgtatttgtaaaacaggatcttgaaaatacagaagcaggacttactcctgtatcatggaactttacaaccatgccgtctgaggaatggaaaaatggtgtgggaaccgcactgactgcttatgcggcagaaactggctcctgggacgatgttgtaagcgcatttgttgacaactgggcaatggaaaaagctctgaccgaataatcgtattgaacaaaatgtaactggaaagggggcgctgcaaacccgctcctggcggaacctccaccgggaacgagaacatgcggcagccccctttctgcgtataagggaaagaggagaacaagatggtaggaaaaacaatcaaaaaatggtggccggtttttgtactgcctacactggccgcttttataatcggatttctctggccgtttatatggggaatttatctttcattctgcaaatttacaactgtacaggacgtaacctttgtaggacttgccaattattccaaactgcttctggataaaaccttcagccattccttctggctgactgtaatatttgcttttgtttccagtattctgatcaatgtgctggcattttctattgctctggcgctgacaaagggattcagaggaaccaatgttttccgtacggtattttttatgccaaacctgatcggcggtattgtacttggatacatatggcagacacttttaaacggacttctttctatgtggggacagccgcttctggcattgtctgcaaaaaacggctttatcggtatgctgattcttctgatgtggcagcagatcggctatatgatgataatttatgtggcaggactgaacaacgtttcaccagatcttattgaagcggcgcagattgacggagctacttccagacagattctctttaagatcaaaattcccatgatcatgccgtctgtaacaatctgtactttcctgacactgacaaacggattcaagatgtttgaccagaacctgtctcttacaggcggagcgccgggcaaacagtcacagcttcttgctttgaacatttacgataccttctatgcccgcagcggacctatgtggaaaggaatcggacaggcaaaggcagttgtattttttatccttgtagtagccattgcactgatccagcttaaagcaacatcatccaaggaggtgcagcagtaatggaaaataagaaaaagaatcctgtagctaccattatcctggcagtcatctctattttgtggatgtatcccattgctctgattctttttaactcattaaaaaaggaatcagcaattaccacatctacggttttcagtatcccaaacaaagaaacctggaatggtctgtcaaactttgttgccagcgtaacacagatggatttcctgaaatctttctggtacagtcttgtgatttcagtgatgtcagtagttctgatcctcctgtgctgttctatgtgcgcatggtatattgtccgtgtaaacggaaagctttccaagctgttttattacctgtgtgtgttcagtatggtagttcctttccagatggtaatgtttactctggcaaagacagcagataccctgaaactgaacagtccgtacagcatctgcattatttatctgggatttggagcagggctggctgtgtttatgtttacaggttttgtaaaaggaattccgctggaaattgaggaggcggcgcttattgacggatgcagtcctctgcaggtatacttccagattctgataccaattttgaaaccaaccattatttccactgcaatccttgaactgatgtgggtatggaatgactaccttctgcctacgcttgttcttgatatcaagcagtatcgtaccattcccatggcagtccagtatttcagaggcagctttggacatgtacagatgggacctatgatggcaagtatcatgattgatatcattccgatcattattgtatatcttgtatgccagaaatatattatcgaaggcgtggtagccggagcggtaaagggctgatcacttttgaaaagattttgtgggggtgctgtaaggaaacttcagcatcccctgttatattttaggatattttataaccggtatccttgtaggggctgtttgagaatgatacaataaagcggatgtcagatttttaatggctgaaaggaaggaataataaaatatgatacaagtgctgatcgtagatgatgaaaagttggaacgagaggggataaaatatcttcttgccatggaggagggagagtggaatatcagagaagcttccaatggaagagatgcactgcagattctgaaaaatgaggagacagacctgcttcttacggatattaagatgccgcatatggacggcctggagcttacggtagtgtcaaataatctatgaaaaacagagctaaagaaaaagactcaaatgaaccttgaaaattgcagatatttattccgataagctctccgagggctcagggcgttgccctgagaacctacaagggaccagtcccttgacccattttcgggcattgcccgaatctatcctcgccggaaggcaggaaaagggtgcagttgccccttttctgctggacaggatcatccgggaactttttgtcaacagactttcgcggcatatcctcacagtcggcatagccgtctgttgtggtattccacggttctattgacaaccgttccgctccggtgcagcagtcccgtttttctgtatattcagaatggtctgttgtccaaggaagatcagaagctgccacttgcctggcatgttatccgctccctggagcatgtctacctggttgagtactttatatcccgtatgtttatgtggtcgcaggaagttatagtaagccacccagagagccaggtcatagttggcaccgtcgatgttatcaaatccgttcgtgctgcggtaagaagccttgtacgtgcggttcagccgttcaatcatctgtttgaaagggcggtgttctttagaaacagcatcgtcgttggtaagtccaagaacctgggtaacggtgaaggtaaagtctttaccaaacttttttgcgaattccattgcagcaagaggatatgcactgtaaccgtccgcaacaaatttaaagttttccgggagttttgcaagcccatggaaagccatacgcatggcgaggatgcagggaccaaccccacggttatcggatacctgatagccgagaatggaacgtgtggcggcgttcatgatcagccagacgtaagttttgatgccgcggatcttgatataggtttcatcagcagtgaagacatcccctttctcgtaaggatactggtcgacaaagggcttgatacagatggcagcggttttgcagtagttagcgatctgctggtgggaaatgctgatgttatacaggtcttttaaagcctgtgacgtcttgcgcagggaaagccccagattgacgtgcagtgtcaggcataaggacatgacatgggcattgtgtttgttgaatttaagggaagaggcatttttaggcagggtatttaagcccatgctgaaaaaatccatcgtgaactcacggtagatgtaatggagcttatatttatttttaccataatcctctgcgagatctgccttgtcaacttttttgaggttgtgaaggtagtaaggacattcgggattgacgcatttatggacaatgaagtgtttcctgtcctttttgggaaccagggtgttgccgcaatgaggacatcgcagctttacggaagagaacctgctttcatcaggagaaaatctggcatcacagattttacacaggagttgtcctttggaaccgttattccggtagaggaagggtttgggagcatcacagcgtgggcaggtgcaggaatctggaatgtcacactctgaccggcggctgatcgggcggatctttttaccataacgcttttcgtagtaagggatgagttctttgtaagtccagtcctgacggaaatccgtgatcagagggagtgaatcaatcttgaacttttgatatttgggagagtgggaatcatcgaaggcccactgcttgagagggatatatctgcagataaaatttaaaagccagcagatttgttgatgttggtattgaattagctgaagtaaataaagtataatgttcatgagcattggctcctttcggggatgttggtttggcgattgacattataccagaaaagggaggtcaatgctctttttatttgtaaacctcctgtaattcaaggttttaaaggattttagaacaataaaaacaggtagtttttgacactaccgagcttacttcaaaggcaaaagaaatgaaaccgggccttcaggttgtgattttcagcggatacagtgattttacgtttgcccaggaagcgatccgctatggggttacagagtatatgctgaagccggtggagccggaaagctttcataagatcataaatacaatcagaaaaaatattctgaagaaaaaagaaaaggaaaccagagagcaaaaggaacaggacttccttcaggaatattttctggaaagctatttttatacaggaaaaaaggacattctggaaagatcagaaggaatgatcgacctggaaaagtggaactgctggcattgtgcgatcctgatcgaatcggatatgtcattttttgatacagctgaggaaaatttttccacggagctccagaaggagctgagacgggtgttcttttatctgaacctgaacaaccggcagtccctgcttctgtttcaggatcattactgtgattacagccttgtggcaaaccatatttatacgtttctgaaaagaacctataaagaaagcttttatctggcggtcagcagaaagtttgacggatatgaatgtctgacggagatcatgagtcagctggagcagcagatggaagaaaagttttatcatccggaaaagcatatttattccaatgatgaggagcatctcaatatggaagtaaaggaggtgcaggattccagacttttgcagctgatctcggaagacgtcagcaggaaagatatccagcagctcagaaagcattatcagtgtctgaaggaaaaatacagcgataatactcaatattctgccatgtatatcaagtttgtgttttccaatgtgatacaggagctttttcaggaggatcagttttcgggggaacggagaattgaacatgaaattgaccgtttatataactgcagaaacattatggagattctggaggtgacagaagagaacatccgcgagtacgaaagctttctggaaagatctatgagtgaatcaaggaatgaggtggctgcagtaaaaaattatatctatcagcattatgcggaagatctcagtctggaaattcttgcggaaaaggtatatctttcatccgggtatctgagctttatttttaaaaaggaaacaggtatgaatctgaaccggtatatccgtgtttttcgtatgaaaaaagcaaaagaactgctgaaaaatacaaatatgaaggtggcgcaggtcagcgaaaatgtgggatttgccaatgtgtcttatttttgccggagcttccgggaatattacggatgcagtccggaatcctacaggaaaggaacaggagaggatgaggaagctttatcagatcattaaaaatatgaagtaccgtcacaaactgacacttcttctggtaggagcaagtcttgttccaatgacagttcttgctctgtacagccatatgcgtatgagctcctttgtccgtcagagggaaatggaggatatggaatccattctggaacagacaagggaaaacattgacagtcaggttgctgtgtacaccagtctgattaattatcttacatattctccggatattgaggagattatcaaagaaaagaacatggataattatacggcatatgagcagtatacaaaggtggcggatcccctcctttcagtgccaaaatcctatcatgaagccattaaacagattcagctgtttgcggacagcatccgggttgaacatgaatatactcttgttccgcttaaaaaaatccaggaagagtggtggagcaaaagtattgaggaggatgtaagaatccagtgggtagtgaacgaagaacggaaagaagttgcagcagtacggaacatatatgacagaaaggaattagaggctgtactgtgtattactctggattatgataaaatctttcaggcctttgacaatattacagaggatgaaaccggcggaatgattgtggatcccaaaggaaatattctgtatcaggatgtagccctgcccgatattcagtcagaaagcgcacgtcccggggaggcgctggaagcagtgaaaaaagagtgcgcatggacagaaagtgccagcagggaaaacaactggaagtattatcttttccggtcaaaggcttctatttccggggcagtgtccagactttttctggaagaaattcctctgatctgtatctgtggtgtgattatttttgtgcttggaacatttttttccagattatttaccagaaaaatcgaagagctgactgccaatatggatcaggtgaatcatggcagccggcaggttgtggtatccagtgacagtgaggacgaggtgggaatcctgatcagaagctttcggagaatgatggatgagatcaatcgtcttattgatgaggtttatgtcaataagatcgccctgaaggaatttgaactgaaagcgcttcaggctcagatcaatccacatttcctttataacaccctgtctgccattaactggatggcgatcaggagcaatcagaaggagataagtaaggtaacgctggctctttctacgttttacagaacagccctcagccgcggcgaggatatggtgaccatggaaagctgtatcaaaaacacagaagcgtatctggaaatccagcttgtaatgcataatcatgaatttttcgtacagtgggacacggattcttccataaaaaacgaaaaggtacccaagcttctgctgcagccggtggtggaaaatgctctggagcatggactggacgaaaaagaggacggagaaaaaatcctttgtattgcctgtctggataaaggtaaggaaatccttctttcagtaacagacaacggaccggggatggagccggaaaaagcaaagactctggtaacgtatcaggcaaaaggatatggacttaaaaatgttcacgacagactgaagcttttatatggaaaaaaatcttctatcggtattttcagtcaaccgggaatgggaacaacagtagagataagagtgccaaaagaggagtacagagatgaaaattaaaagaatgggagctgtgtttttccttgtggtctgtgtattctgcggctgcggaaaacatgaaatatctcacgaaaaaaacgggcagaacgtatcagaagaatacagaagggcaatggaaaaggcagaaacaacaccctacggggcgtatccggagcttgtaacctatactcttgcccagatcagcggagccaataattccaatcttccggaaggagatacgtatgaggataatgcctataccagataccttcgaaaaatgctgaacatacagaatgataccgtatatatggatacagaggagcgctacagtgaacttgtaaatattctggtaaaggatcagaatcttccggatataatggtggttacagacagggagatcctgaaggagctggtggaaaatgatcttgtggaggatcttacagaggtatttgagaaatgtacgtcttcaagaatcaaagagatgtatgaaagctatggagatgcccttctgaactccggaaaattcaacggaaggctgatggctgttccggaaacagtgatcgaccacggaccgaatcttctgtggctgagaaaggactggatggaggagttggggctggaggagccggaaactcttgaagatgcttttgagatcatagatgcttttgtacaaaacagaatgggtacggaagatggagaaactcctgtgggtctggcatgtgacacaaatcttgtgggtaccacaagctccagttattcggtagatcctgtgtttgacagttttggggcaaatcctcagagatggatcagtcaggacggagaaattgtttacggatctctgacagaagaaacaaaggaagctcttgattatctgcataagctgtatgacagaagaattctggatcggaactttgccctgcgcgctcctaataatctgagagatctggtcgtaaatggaaaatgcggagcttttttcggactgtggtggactcctaataatccgctgatggaaagctatgagaaaaacagcgaagcagactgggaaccttattatctccaggaactggcagataaaaatgtttatgaatccttcagggataataaatatgtggtagtccgcaagggctatgagcatccggaaatcgtgatgaagatcatcagcgttctttttgattataccaggtatgaggcagaagatgcccgggaggtaaacgaatattttgctttgaatgtggaccctactgcaagaccgcttgtgatcaatgtggattataacgaagcaacctatcaggtgacagaaaatattgaggcagctttgaatggaaactatccggagggaaatcttactgccattgagcagtcctactatcaggcctgcagttcctatctcagcggaaatgattacactgcggaagactgggctgcatacaaatcaagaatttcagcagtagggcttcttgtagataagcattatacaccggctgtcagaagctatctggatgatgcaggcggagaaatccctcaatccctgcgccagtttgaaacaagtacgtttattcagattattatgggagaaaagcctgtcagctattttgaaacctttgtagagcagtggtatcagcagggaggtcatgagctgacacagcagatacggctgtcaaatccttctacgtgattgaggcttgtgggctttatttatatggattcagaagcgaacataaaagtcaacagctatttagaaaaaaatctaaataggtgttgactttttgtatatagagaggtatattctatttagaaatatttctaaatagtttcatgaaaaggagggatcaaatgtcttttgcagctacatttaaggcgctgtcagatcctgtaaggagagaaattctgcagcttctgaaaaacggaaaaatgtctgcaggagaaatcggcagccattttgatatgaccggagctaccatatcgtatcatttaagtgtattaaaaaaggcagatctggtatgggaaacaaaagtaaaaaattatgtgtattatgagctgaacacctcagtggtggaagaaatcctgctgtggctgtcagagctcaccggtgaaaaagatgaagaaaaggagagtaagaagtaatgctgcttttgcagcagagaattttcgaccggaaagattatgaaactggagggatgattattatgataaaaagatacaaatggacactgtttgctgccagccttatgattctttgccctatcatagttgggattattttctgggatcagcttccagatatgattcccacgcatttcggcagtgacaatcaggtaaacggatggaccagcaagcctgtagctgtatttggaatgccgttatttttacttgctatggaatttttctgcgcatttatggtcggcgcagatccgaaacgtaaaaatatcaaccagaaactgatgcgggctattctctggatgattcccattctttctgtggtgacaaatctgatcagttatgcaattgcattgggaatgagtgtggacacaggtatggttgtaaacatactcctgggaattatgtttgttattatgggaaattatatgcataagatcaaacagaactattcagtaggaatcaaacttccctggacactgaacagtgaggaaaactggaaccgtacgcacagagtggcctcatggctgtttattatgggcggagctatttttgtgatcaatggatttctgcagtcaaagtgggtgctttttgcattccttgcctgtgtgttcctgattcctgcaggctattccttttatctttataaaaaaggaatataaaaatcacaggcaacttgattagctgccgcgcaccggaagctgccggtattctggacaatatataaaaaattcataataaaaactgtccccttttaaaagataaaaattgtgtattttaaaaagcacagatatcgattaagatatcagtaattcatgaaaaaagaggaggcagttattatgaacaatcagaacaacactatcacaaaacttgcagaaaccgctcttcttgcagcgctctgctatgtagcctttacatttcttcagataaaaataccagtgcccggaggcgatgctacttcaatccatatcggaaatgcattttgtgttctgggagcgcttcttctgggcggatggtatggaggacttgccggggccattggcatgacggttgcggatcttatggatcctgtgtatatcacaggcgctccgaagacctttatcttaaagctttgtattggtcttattacaggacttgtggctcataaaatcgcaaaaataaatgagagcacagataaaaaatatgtgtttaaatggagtgtgctggcatctgtagccggacttgcatttaatgtggtggcagatccggtggttggatatttctataaacagtatattctcgggcagccccagaaaatggcagaggttctggcaaagatgagcgcaatggcaacatttgtcaatgcagtaatatcagtgattcttgttgcagtgatatacaatgcggttcgcccggtgctgataaaaagccatcttctggtggtcggacagtgtaaacaggccggctgaaacgggaaaatggattcaggtaaaagaataaaagtacaggcggcagttgtgaaaaataagattcgcccttacagatgtcagattatattttctgcggttctgtaagggcgattattttatgaattttccggattaaacaggagcagggaaaaaagacgtattttttcgtcctgtgtccagcacagcatattggcagcgtcagccattttctgggcatcaatgccgtaagctgacatacaggaaaaacgtttgtaaggcccggcgctgatgagcagaggagtggtttctgcgtcagcttccatttttttataaagtttttctgtaagaatgttatggttgtactttgctttttttacatcaaactgttcttcaggagattccagaacagtctgaagaatcagcgcctttttataattcagcgctttccggtgcatttcttccggtgtgccgcatgctggcggacaggaggatatcacattaaagttcccacagagattttcttcgcagaattgccggtactccagtacgaataccaggtctttcacatcaataacagcagcattgttaaagccaagagtcagggcttcttttataaaatccatataaaatatccgatccaatcagatgcataagatgattggaattttcctttctcccatgttatggggaagtgtgtatagtgatagaaagtctgatagtattataacgcatatgggaaggaatgaccatggtttattcttctatctgtaatgaatacattactgttcacaggttactatcccgcaaggtgttttggcatgtatagcaaaaattctgaggcatacaggtcaaaatgccatcatcgaaggtgatttggaatgtattttaaccaggttactgtgaagggcgtgaacagtaatataaatacacaggaggggaatgatgggattcaatttcacataacagcgagattgaaatgtttgagggattccggtttattagaaaaagagtgtaaaaaggttaaaaagacttattgaaaaaactattgaaaaatttataaaaaaaacagttgacagaggcggaagaaagtggtaaattaatctggctgtcacaaagaaatgattcttttgaagaaacaacttgaaaaactttgaaaaaagtcaaaaaacttgttgacaatcctttctgagtgtggtaaagtaaacaagctgtcaacgagagagcgaattacttaaaagaacatcgaaaaagtttgaaaaaacttgaaaaaagttcttgacaaacaaaaaaagatgtgataaagtaaacgagctgtctgagagacagaaaacaaagaaccttgataactaaacagtgagacacatacgattctcgaaaattcttttacacacagaacacttaatgaacacaagcggaaacgcgaagtgtgaatttagtgtgagtgcggttcgaaggaacttaatgagatcaagcggaagcgaagatcgaatttagtgaatcgaacttcattatttgagaacggttcgatgaaccaacaacagtaaaacgagagatagctagtagttatcttgagtggaacaacctcttgagcctttggctcaatcggtgagatgcaattaagccaatgcaagcattgctgaattgcttacacacttttacagagagtttgatcctggctcaggatgaacgctggcggcgtgcttaacacatgcaagtcgaacggggattattttgacagagacttcggttgaagtcgttataatcctagtggcggacgggtgagtaacgcgtgggtaacctgcctcacactgggggataacagtcagaaatgactgctaataccgcataagcgcacggggccgcatggctcagtgtgaaaaactccggtggtgtgagatggacccgcgttggattagccagttggcagggtaacggcctaccaaagcgacgatccatagccggcctgagagggtggacggccacattgggactgagacacggcccagactcctacgggaggcagcagtggggaatattgcacaatgggggaaaccctgatgcagcgacgccgcgtgaaggaagaagtatctcggtatgtaaacttctatcagcagggaagaaaatgacggtacctgactaagaagccccggctaactacgtgccagcagccgcggtaatacgtagggggcaagcgttatccggatttactgggtgtaaagggagcgtagacggagcagcaagtctgatgtgaaaggcgggggctcaacccccggactgcattggaaactgttgatcttgagtaccggagaggtaagcggaattcctagtgtagcggtgaaatgcgtagatattaggaggaacaccagtggcgaaggcggcttactggacggtaactgacgttgaggctcgaaagcgtggggagcaaacaggattagataccctggtagtccacgccgtaaacgatgaatactaggtgtcgggtggcagagccattcggtgccgcagcaaacgcagtaagtattccacctggggagtacgttcgcaagaatgaaactcaaaggaattgacggggacccgcacaagcggtggagcatgtggtttaattcgaagcaacgcgaagaaccttaccaagtcttgacatcccgatgaccggcacgtaacggtgccttctcttcggagcatcggagacaggtggtgcatggttgtcgtcagctcgtgtcgtgagatgttgggttaagtcccgcaacgagcgcaacccctatccttagtagccagcggtttggccgggcactctgaggagactgccagggataacctggaggaaggcggggatgacgtcaaatcatcatgccccttatgatttgggctacacacgtgctacaatggcgtaaacaaagggaagcgagagtgtgagcttaagcaaatcccaaaaataacgtcccagttcggactgcagtctgcaactcgactgcacgaagctggaatcgctagtaatcgcggatcagaatgccgcggtgaatacgttcccgggtcttgtacacaccgcccgtcacaccatgggagtcagtaacgcccgaagtcagtgaccgaaccgaaaggacggagctgccgaaggcgggacggatgactggggtgaagtcgtaacaaggtagccgtatcggaaggtgcggctggatcacctcctttctaaggaagaagaagtagagagatgtgtttcactgtctaggtattaaggggaaacaaggaagttccgttcactaaatccgccctgccttacagttgggcttattaagttcctcggaacgaagtccgtactaaattcgtacggcgataaatcttgtactcattaagtactctgcttctggtggcgatgcgcttgggggagacacccgttcccatcccgaacacgacggttaagacccaagcggccgatggtactgcattggagacgatgtgggagagcaggtggccgccagatcaaaaaaagaaaaacagggagacctgttgagataaatacaggcactggaaagtgagctatgtcggaaacatagtggaaccagaagagatttgataagtccggtgctaacccgaaccagccgggaagagctgttgaaaactggtggttttaccagtgattagagtttgtaaggaagcttgcggattctaatgactgataaaagatcagtcagacatgcaccttgaaaactgcatacatgtaactttgtgtattgattgtaagtgcacctcggaacaaaggttccccggtcgcgactgcgtcgcatatacaatctgcatgataagcatttatggaagcaagcttccaacatacttatcctttgattgtgcacttacttaagttacacgaagatccttgatacaaacgtaaaacgtaagataggaagacatcgataaatttatttatcagcaatgagaatcaaagaccgcatcacctacgctagggtgatgaaaagcgaaaggtcaagcagaaagggcacagggcggatgccttggcactaagggccgaagaaagacgtgataagctgcgataagcttcggggaggagcaaatatccattgatccggagatctctgaatggggaaacccacatgaggaaacctcatgtatccatacgccaatccataacgtatggaggggaacccggggaactgaaacatctaagtacccggaggaaaagaaagaaaactcgattccgtaagtagcggcgagcgaacgcggaggagcctaaaccagtgtgcgtgcacgctggggttacggactgcatttaagattctgtaaagctagcagaacggttttgggaaagccggccggagagggtgagagccccgtacgcgaaagcagagcagactgagcaggatccagagtaccgcgggacacgagaaaccctgcgggaagtgagggggaccaccccctaaggctaaataccacttagtgaccgatagcgcatagtactgtgaaggaaaggtgaaaaggaccccgggaggggagtgaaagagaacctgaaaccctgtgtctacaagctgtggaagtgctttatatgcacgaccgcgtactttttgtagaacggtccggcgagttgcgcttactggcaaggttaaggtcttaaggaccggagccgtagggaaaccaagtcttaagagggccagagtcagtgagggcagacccgaaaccgggtgatctatccatgtccaggttgaagctgccgtaagaggcagtggaggaccgaacccacatccgttgaaaagggtggggatgaggtgtggataggggagaaattccaatcgaacccggagatagctggttctcctcgaaatagctttagggctagcctcggtagagattagcggaggtagagcactgaatttcctagggggcgtcaaagcctaccgaagaatatcaaactccgaatgccgcagaattgcttaccgggagtcagactgcacgagataagttgggcagtcgaaagggaaagagcccagaccttcagttaaggtcccaaagtgcgcgttaagtggaaaaggatgtgggatttcaaagacaaccaggatgttggctcagaagcagccatccattcaaagagtgcgtaatagctcactggtcgagaggtcctgcgccgaaaatgtccggggctgaaacgcgccaccgaaactaaggaatcagaaatgattggtagaggagcattgcatgcgggacgaagcagtaccgtaaggagctgtggactgcatggaagagagaatgccggaatgagtagcgagaataaggtgagaatccttatggccgaatatccaaggtttccagggtaaagctgatctgccctgggtaagtcggggcctaaggcgaggacgagagtcgtagccgatggacaacaggtggagattcctgtactgcggtataacagaactgtggggacacgtgcagaaagcgggagccgggaatggaaagcccggtgcaagtgaggtaccagacacattggcaaatccgtgtgtcaatgggaagacacgacgcggaccgaaagaaagtagggaagcccgtgagctgtgcgtcaagaaaagccgctatagtttataccgtacccgtaccgtaaaccgacacaggtggatgaggagagaatcctaaggccggcggaagaagcattgtcaaggaactcggcaaaatgaccccgtaacttcgggagaaggggtgccagggagacctggccgcagagaataggctcaagcaactgtttagcaaaaacacaggtctatgcgaaaccgaaaggtgaggtatatgggctgacgcctgcccggtgctggaaggttaagaggagaggttagcgcaagcgaagctttgaatttaagccccagtaaacggcggccgtaactataacggtcctaaggtagcgaaattccttgtcgggtaagttccgacccgcacgaaaggcgtaatgatttgagcgctgtctcgacaatgcatccggtgaaattgaagtaccagtgaagatgctggttacctgcgccaggacggaaagaccccatggagctttactccagtttggtactgggatccggtgctgcatgtacaggataggtgggagactgagaacacaaaacgccagttgtgtgggagtcgctgttgggataccacccttgcagtattgggtttctaaccatccgccgtgacccggcggtgggacaatgccaggcggggagtttgactggggcggtcgcctccgaaagggtatcggaggcgcccaaaggttccctcagaatggacggaaaccattcgcagagtgcaaaggcagaagggagcttgactgcgacaccgacgggtggagcaggtacgaaagtagggcttagtgatccggtggtattaagtgggaatgccatcgctcaacggataaaagctaccctggggataacaggcttatcactcccaagagttcacatcgacggagtggtttggcacctcgatgtcggctcatcgcatcctggggctgtagtaggtcccaagggttgggctgttcgcccattaaagcggtacgcgagctgggttcagaacgtcgtgagacagttcggtccctatccggcgtgggcgtaggatatctgagaggagctgtccttagtacgagaggaccgggatggacgggccgctggtgtaccggttagactgccaagtctacggccgggtagccaagcctggaagggataaacgctgaaggcatctaagcgtgaagcccccctcaagatgagatatcccattcgaaagaagtaagaccccttgaagacgacgaggtagatagggcagaggtggaagtgcggtaacgtatggagctgactgctactaatcggtcgagggcttgaccaaaaagcgagaaagcggtcaggacaggaaagaaacaggacggaacaagcttgcttgtgaaggagtggttcttaactggactggacatttgcgaagcaaaaggcaccgaatgacggagtcatgaggtgaccgcattcgagcgaaagcttggtcacacgattccaaatgtcaacatgtatgtagttttgaatgtgcaacatcagtagccgtatcggctactttttttgtttaccgggaaaaatatattctgtactgacttttctggtaaacaaaaaacgctccgcaaggatgcaatcagatggagttttgtaagcgtcaaataagtcagtgttttgatttatgacttttttgcatggataatagttttaaatcttttagagcttttagagtggactcttaaaattcccacacagaagtttatttatgaacgaattaacacccagggaacaatgctggcgatgtgtcttgcattattaacaggagaagaaaagaggaattttatgttaaagataaaccgggaatatatgctggaacttacaagacgtatgacagtttctcgtacagcaatgacgcgtattgtaggctgttatatggataaagatggatttgttgacggaacctttaatacaaattttttgaaattatcgtccgcagacaaagccaaaaatctttccatagcaaaggcaattcctttttcagaaaccaataagaatctaaaaagatatcagtttacaggacgtgactcagtgaaaatgcgtcagctgcttttagggctgaaatcatgtgcgcttaaaaatgatgcgcttttggatacattttatgatctggttgcagaaaaatgtcattttacttatgattatgcagtgattttttttcatggtacttatgatattcccgtaaaaggaacagataaggaaagtctttgggattctgaagaggtttatgaatatttaatctgtgcaatatgtccggtaacaggtgattatgaggcaggtgttccggaatttggctttatttttccggcgttttgtgacagaacagaagatccggattatattgatatttatgaaaaatattcggaaagacctcatagtgaactatatcatctccttggattaaaataagacagttataattccgctggcagacagagggtaacagaaatcaatttcctgcaattattgtgataagctgatgtaattgtttttctgatataccgttaaagagccgggctgactgatctccgttacatattttgttatatgaaaaagggagcccgtttatggactcccatggctatagacacctcaagattttgcagcataaccgctgcagatatgtttcagtcttttccggctaaagaatatttctttattgaagaaaaatagctgataataagaaggaccgcagcccctgtccaggcagcaatttcagcataaaaaattccgtctgttcccataataaaaggaagaaaaactgcaacacctacacgtacaacaaactcaacaacaccgctgagcatggggataaaggtatttcccagaccctggagggctgatctgtatacatgaaggaaatacaggatacagagacaacatgccataataaaaagatatttccaggcaatatccaatacctgtccggcctgggaaggatctcctgaaataaacatggacaaaagctgttttcccaaaataaacataacgcaggagatcagggctgaggtaagaaaagcaagcaaggtgcttgaccgaacgcctttttttatgcggccgatttccccggctcccagattctgtccaacataggtcacaatggcatatccgtaggaaatagctgccatttcaaggataccgtataatttgtttgttgcggtaaagcctgcaacaaaaaggaagccatagccattgaccacatactgaactaccagacctccaattgcaatgatagtattctgaaaaacgacaggcgttccaagcttcagaagcttctggtccagtccgggacggcgctgaagatcctggcgggagatatgaagcagttttatttttctgacaacaagaaagcagtatactgcagaaaaaagctgagcggtaaccgtagcaatggcagcgccggcaactccccagtgaaagcctgccacaaataaaagatccagtattacattgacagaagccgcaatgatcattgctgtcagtggagtacggctgttcccgacagcgcgcagtacagaagcaaacacattataggcagcaactgcaggtattccgcagaatacaatccgcagataaatcagagacataccgataatatctgacggagtatttaaaaacaccaggatcccccgggcaaaaatctggctgactgtcagaagaacaacggaaataacggcggtaagtacatagcttcgtgcaacagactgttttaaaaaatcctctttttttgcgccatagtgctgagaaatcagaatagaaaatccctgtgtggcgccggtagaaacaccaagaaccatccaggtgatccattcaaccgcgcccaaagcagccagagcctgaactcctgcaatctgtcctacaacaatagtatctaccatagtataaagctgctggcagatgtttcccaacattaagggaatggcaaacagaatgatcagtctgccaggtgatccttttgtcatatcccgaacctgacctgacataacatttcctcctttgttgttttcgtatttttaattataaaactctaaatgagcaaatatcgaattttgcataatagaatccgtaatatacggacaaaaaatattaagctctatatgcgcatcttataaagacaaattcatgataattttgtgcgctttttcaaatttgcccttttatagttttctataaaaaatcaggcaaacatggctatttttacatgattttatggagttgtcaagcagtaaaaaccaggttgtggaatgaacagcaataaaacctgtttaccttattggacgacaggtgtatgataggaaaaacagttatacggataagattcagaaagcgaaaatatcagaacagatgtgagtatctttggaactgcgggatataagagattgtgaaaatgaaacgtatggctgtaaaaaagagaagggaatcattgtagaaaacatggaagaaaaagtatatacaacaccctatggaaaaatttattattggactgcatattcaggaaaagaaaaacaatggctgatatttctgccgggtctgacagctgatcacagattatttgagaaacagacagaagcattgagaaaagattataactgtatggtttgggatgctccggcacatggaaaatcccgtccctttacactgtgttttactatggaggatatggccgattatctgaaacagattttggaaagagaggggattttctcacctgtactggttgggcaatctcttggagggtatatttctcaggtttatatgcagagatatccgaagtctgtatcaggttttgtttccatagattcctgtccccttaagagaaaatattatacaggagcagaacttctgatgctgaagcatacgaagtggatgtatcgttctattccctggaaaatgctgctgaaatttggaacagaggggacatctgaaacaaaatacgggagaaagcttatggttcgcatgatgctttcctacggaaaaaaagaatactgcgatcttgcagaccacggatttcgtatttttgcacaggctgtggagaaaaaacttccatatgagatttcctgcccttatcttgtattatgcggtgaaaaggatgctgccggctctgcaaaacggtataacagaaactggaaacgcagagagcactgtatgctggtatggatacctgaagcaggacacaattcctgctgtgatgctccggattttgtgaacaggcatataaaacgatttgcggacagcctgaagaaagacagaagttactgcgaacgaagggaacaggtaacagacagaatataaaaagaatataaattctgtgaaatcccttgcattttctgaaagaattgtcataatgtaagtagaacaaggaagggagtgattgccgatggacattcagttatcggatgaagtctcacaggcgtatctttcagaggttgaggatattcttaaaaataaagaatttctttctctcagtctctatgaacatcatcagtggacaaacagattaatgcacagcattaatgtttcctatatatcatggaagctggccaaaaagctgggatgtgatgctacagtggcagccagagccggacttttacatgatttttgcccctatgatttccggcagaaaacgcctacaggagaacatcaggcattctatcatcccaaagctgcggctgacaacagtgcaaggacatttgatatcagcgaaaaggaatggaatgcaattctgacacatatgtttcctctggggccggttcccaaaaacagagaagcatggatcatcaccatggcagataagatatgcgccagcctggagttatgccacattgcggtagctctggcaagacgcaaccgggtagttgtagtatcagctccggtataaagcagggcctgctgtatggattgtctccgacagcaggcttcttgtgtcctgttttaccggagctggatctacagagaataaaatttcaatgttattaaccccgggggattttgcagaacatgttacagaaaccagctggatgctaaaacgaggtgtaccaatgaaaaaatttacaaaaaaagagatcttttctattcccaatattatgggatatttccggatccttcttattccggtgttctgctatttatatattacagcagaaagtgaaagagaatatctgtatgcagcctttgtagttcttatttccagtcttacagacctttttgatggaaaaatagcaagacgttttaatatgataacagagcttggaaaagctttggatcccattgcagataagctgacgcatggcgcccttgcggtatgtcttgcaacaagatatcccttaatgtgggtgttgatcgtactcatgatcatcaaagaaggatacatgggaattcagggacttattttcttgaaaaaaggaaaaatgctggatggcgcaatgtggtttggaaaggtctgtacagcaacgctttttgcgggtatgctgatattgttcctgtttccggttcttccattatggcttgtgaacggcatgatctgtgtaatgatggcagtcatgcttgtgacactgtgcctgtatgtgccggtttttaaaaagatgaaagaagaataacagggaaccggaagcataaaatctgcgcatgcgggaaattttatgagggatcacagataagaaataaaataagacagaaagggaaatcacaatgtttgagcgtattgattatgaggtaaaacgaattgacggagattatgcgtatcttcagaatatggaaaacagggacgaggaactgaaatgtgtggcaatggctttgcttcctccggaaatcatggaaggaagccgggtagcttacgaaatgcttcagtattttatggcagaataatctgcagccaggttatagtaaaagcagcagatcacaatcaggaagcagaataaaaatgcagaggaataaattttggaaaacagcaggattctgattatagatgatgacagagaactgtgcatccttattaaaaaaagtgtggaaaatgaggggatagaagctgatttttgcggaaccggaagagaagggatggaaatgctggaatgccgggagtatcaccttattattctggatgtgatgatgccggggatggacggatttgagacgctgaaaaaaatacggcagaaaagcaaggttccggttcttatgtttacctcaaaaaacgataattattccaaagtaagaggcctaagagaaggcgcagacgattatctgacaaagccttttcatatggatgagcttcttgcccgtattttttctctgatacgaagatatacacgctttaacagggacagaaacagtcaggagatccttcagtatgagggactctgtgtgaacatagacgagcgttcagtaaaaacaggaaatggaacctttgagcttccgccaaaggaatttgacgttctgatgtttcttgctgagaatcagggaaaaattttaacaaagcagaggatttacgaggctgtctggaaagagccttatgtgtatgatgacaataatattatggcagttatcagcagacttcgaaaaaagctggaagaaaatccggcaaatcccagatatattcagacgatcaagggaatcggttaccggtttaacagggaggtataaaatgacagtgggagtagtaatgtttctggcaggagcagctttttttgcagcttctgtttttttattgtacggtataaaaaaacagctttcagaaatgacagaggcgcttaaggaagtaaaaatgggaaacggaaacagaaggatccttgcagctcccggtgaatggacagcgcctcttgcctatgagcttaatggaatcattcgttcctatgaagagcggattcttgcgctgaataaagctgaggaaacaaacaggcagcttatgacaagcctttcccatgatgtaaggactccgcttacaacgctgatcggatatctggatgcagtacacagacagcttgtgacaggagatgagcgggaagcatatatggagaccgcacgaaaaaaggctcatgatctgaaggaatatattgatattctttttgactggttcaggctgaactcagatgaatttgccatggacagggaaatactggaagctgctgagctgaccaggaatattctcattgactggatacctgtttttgaggacacaggttttgactatgatatacagattccggacaggcctgctcaggtgtctctggatgcagagtgttacagaaggattttaaataatctgatacagaatgtgctttctcacagccatggaagctgggtggaaatcaggatgctgcaaaaagcccgggaagtaagtatttcagtatcagataatggtgtaggaatggaaagcgaagatctgaaacatatttttgagcggctttataaatgcgacagagcccgttcggaaaaaggaagcggactgggactgtctattgctcggcagcttacagaaaaaatgggaggcagaattgctgtccaaagtcagccgggaaaagggacaagatttacgcttacatttcctttgtgtgaataaatgcaaggattttgcaaggttaagataagattatcataaggttcatatggtatcatttcagtcagaaaaggaggaataaggaaatgaaacaatatctgattgaaacagaccatcttaccaagcagtatggagagcagaaaagtgtttcggatctcagcattcatgtaaaagaggggcgtatctacgggcttttgggaagaaatggagcgggaaaaaccacaaccatgaaaatgctccttggacttactaagcccacatccggacagataaggatctttggaaaatctgtgtcaggaaatgaaaagaaaatcctgccaagaatcggaagtctcatagaagctccgggattttatccgaatcttaccggaacggaaaacctcggtatttttgcagcgctgaggggaatccctgacagaaatgcaataagagatgctttggatctggtggggcttccctataaagataaaaaactgttttcacagtattcccttggaatgaagcagagactggccattgctcttgcagtaatgcatgatccggagcttttgatcctggatgaaccggtcaatggactggaccctattggaattgcggaggtacgttcctttattcaggctctttgcagagaaagaggaaaaacaattctgatttccagccatattctttctgagatttcgcttcttgcagatgatatcggaattattgatcatggtgtgcttctggaggaggaaagtcttgcggagctggaacagaagagcagcagacatatccgtttttttgtatctgatacagctcaggcgggaagaattctggaactgagattccatgagaagcgttttaccatacaggatgatcacaggctgatcgtccataatctgaacctgcccacaggacagattgtaaaagcctttgtggaaaacggactggaggtgtgcgaggctcatatctgtgaggaaagcctggaggattatttcagacgtgtgaccggaggtgagggcattgcttagactgatccaatgtgaatttctgaagctgaagagaaaaagactgtttcaggcagcttttcttacaacttttattatgcctgtactttattcattgctgctgtcagacagtagttttgatgatctcatgagcgtaatacgggaggaaaacggatttttgcttctgatccctctgaccgttgtcctggcggcaaatctgttttttgaagaacatgattatgatactttaaaaaatctgatgtgtgttcctgttacaaagggaaggcttaccatggcaaagctgtttgtacttcttatttttgacattgcctatgaagctgccggatatatgatcgcggctgcgatgtctgtgatatccggaatccgtctggaggaagccggacagcagctgattcttaccctggctacaggagtgcttttatgggctgcgtccatgccctgcatttttattgtggtgtggtgtaacaaatcctatattatttcagtgatcattgcctttgcatatgtaacactgaattatattcttcggatcaatgacagctttctcatggttccggcaggacttaatcttcctacatttttacctgttccgatgatctttcggtggctgtaccaatttcactctatagagaatgtgggagaggttctggcagaattttatgagcgctttcagccatattttatttccggaccactggtttttacagtccttctatcagaagcggcagtctgtattgcactgatcatacaggtttataaaaaacaggatgtgtaggaggacagggaaaatgacagctattataaaaacagaatttcagaaaatgaaaagataccatattttactgattgctctgatcgggatgttttgttcaccgctgcttcagcttttttcacagtttgccatgaacgatgcattaaaggatccttattatgatcttgccgcattgctggaaagtaccatatggggaaatgctcagatatttctgccagttatgatcactttaacaggaggctatctgattaacagagaatacacagatgataccttaaaaaacattctgacggtgccggtttccttccacagattcctttggggaaagctgctgacctccggcatccttgccgtaggatttggaatttacagcttttttgctgcgattattgttggcttttttgcaggacttccaaaagccggcttttcggtacttacaggatattttttccagatggcaggactctcggtatgtatttatattgtggttcttcctcttcttattattgacagcagaaaaaaaggaagatttatgggaggagccgtggcggcttttctggtgggatatgcctgtctgttttttaaaacaggaattttaagaagcgtttatcccgtatcggcagcgctgactgttgtcggatttgatatggcagagtacacagggacagcatcgcagggcaacagggttcttgcagttcttgtactggggattatacttcttgtgtcagtgatgcttgtatggttttgcaagcctcctcaggagggaacaaaacataaaatcaggggaagaagagggaaacaactaagagtatctcagcgttaatacaaaataataaaacttccggtacggagctgtattatgacagcaaagaccggaagttttgtgattcattggaaaagaccggacaagagagttgttgaaaccttgaatatttgctgataaaatgatgaagataacattagaatacatgaatattttgcaaaaactgagatgtgagaaagcagctgaaaatcattattcggcaaaaacatcagcataatttttgaggaaacaagggagagatcatatgaaaaaaagactccttattataaatacaggcggtacgctttcttctgtaaacggcgaaaatggtctgatgccgggaatgaaaagcagagatatgctggacgagcttcgtatggtgtcccggaatctggaactggaaacagaggatttttgctctgtggacagcgctaatattttcccggaggactgggcaaggctggcggagctgatcgcaaaaagaagcagggactatcagggaatcgcagtgatccacgggacagatacactggcgtacacagcttctatgctgtcgtttatgcttcagaatatttccattccggtagtggtaacaggaagtcagttgtccatagcagatcctgtggcagacgctatggaaaactgccgctgcgggattcatatggcggctggcggctgtccgggagtatttgtggcatttaaccgtaaggtcatgctgggatgccgcgcctctaaggttcggaccatgagttttgacgcatttgaaagcattaattatccttatattggtgaaatcagttctctgggacttcatatctgccgggaaaaccttgtggaaaaaagaggaatcttccgtccccagacatcctattcagacaaagtatttctgctgaaattatacccgggaacagatccttcgatcctggactatcttcaggaaaaaggctgccggggcgtttatgtggaaggctttggacttggcggaatgccgtttctgaaaaatgattttatcggagctgtgaaaaaggcagtagaaaatggaatggtcatacttgcaggcagccagtgcagatatgagggaagcaatctttctgtgtatgagacagggcggagagctctggaaagcggtgttctgcaggcctatgatatgactgcagaggcagccatggcaaaactgatgtgggttctgggacagacggacagtctgagagaaatcagggaatatttttctgtggatattgcgggagaggttacgatccctaaagagtgaggacggagatcacagtttctgaaggagagctgttaaagctgcgaaataaaggtccggcttgaaatttaaaattcttcctgaccggtctggaaaaaatgtttgggggatttaccagttacctggcagaaatttttatggtatgatataactggattttcaggaaggggaagagtaaaaatggacttttataagcgggcggatcttgttatgaaaaaagttccggaaggcagagtggtttcgtacgggcagattgcgcttctctgcggtgttcccggaaatgcaagacaggcaggctacgcgctccggactggaaaagcaggacagaagactgcgtacagagtggtaaatgctcagggctatttaagcggcgcaggggcttttgagacctgtgatatgcagagacttttgctggaaaaagaaggaatccgggtattgtggacagaaaagggctggaaggtggatatgaagacctttggctggaaaaataccctggaagatgcagaagagctgcgaagagaatttgaaaggcttggagtttaggcattatggaaaaaaatcttacttcaggaagtgtatttaaaaatattgtgttcttttcacttccgtatcttctgtcatattttttgcagaccttgtatggtatggcagacttgtttattatcggtcagtttgaaggagtagacagcattacggcagtttctgtgggaagccaggtcatgcatatgctgacagttatgatcgtgggacttgccatgggctctacagtagtgatcgggaaggcggtgggagcccggaaaaagcaggagactgcatcagtgatcggaaatacggtaactttatttatggcagtggctctggtttctactgtgctgcttctggtattcgttgatcccatagttgcggttatgtccactcccggggaagcggtttccggtacagtcaggtacctgactatctgttttatgggaataccttttattactgcctataatattatcagctccattttccgtggaatgggcgattccaaaagtcccatgtattttattgcagtggcctgcggcgctaatattgtgctggactatgtgtttattggagcatgtcatctgggaccatccggcgctgccctgggaactgtgctgtcccagaccatcagtgtgatcactgctctgatcgttattttaaggagaaaaacgggaatttctctgaaaaagcaggatttcagacctgatgcagaggtaatgaagcaggttttaaaaatcggtattcctgtggcgcttcaggatgggtttatccagatcgcttttatagtgattacagtaattgccaaccgaagaggactgaacgatgcggcagcagttggaattgtggaaaagctgatcggaattgtgttcctggtgccgtccaccatgctttcagcagtgtctgctctttctgcacagaatatcggagccggaaaaccggagcgcgcagtaaaaactctgaagtacgcggtgatgatttccgtgggattcgggtttacagtagcagtgcttacacagtttgtttcagtgccggttgtaaagctgtttactgatgatgcggcggttgctgtttccggcggacagtacctgcgctcttatatctgggactgtatgcttgcaggagttcatttctgtttcagcgggtacttctgtgcctgtggaagatcaggaatctcatttttacataattttctttcgattatatgtgcccgtgtgccgggcgcgtatctggcgtcagtatattttccggatacgctgtatccaatgggacttgcggctccggcaggatcacttttgtcaggggtgatctgtgtggctgcgtttgtgtatctgcagaagtgcaggaaaggacgtgaaggatatgcataagatttttggacagagagagaaaggacagtattatgacagatcaggcgcttacctggttatattttccggggaaaaaacagcagtagtgcgcaccgccagaggattgttccttcttggtggtggtatccaggggtcagaaaacgatcaggaatgtatcagaagagaatgcctggaggaatgtggatgcgaatgtacagtaaaagaatatctggcttctgcggaggccttcagtgttcacgatacaaaaggtctgtttcacccaatacagagatattatatgggggatttgcttgacaaagtacaggaacctacggaaaaagatcactttctgatctgggcagattatggagaaataaaaggaaaaatgtattcagatatgcagaactgggctctggaaacaggatggaaaaggagacacaaggaatggatatgaggaaacgcagagatgcgcagcttgcctatatttctgacgaaagcgtatttgaagagcaggttgcgtgcaggagaattcttcagaaactgaattttatggaccgggcggattttgacggaattgcagaggtggtaaaggagcttctgggtaagtcggacaatgcttttattaatccgccgttttactgcgactatggaaaaaatattgagactggtaagaatttttttgcaaattataactgtacgattctggatgtggcaaaggtaagaatcggcgataactgtcagtttgcgccaaatgtagctatttatacagcaggtcatccggttcacccggacaccagaaatactttgtatgagtatggaaaagaagtgacggtaggggataatgtgtggcttgggggaaatacggtggtatgccccggggtccatattggaaacaacgtagtgatcggtgcgggaagtgttgtgacaagagacattcccgactggtctgttgcggccgggaatccctgccgggtgatccggaagatcacagaggaggacagaagaaaactgtttcggaatgaggagattgatgaggaagcctgggaagatattttatcccgtatccaggatgaaaaataacacagtacagaaaagatttccgaaattcagataaaaacaaataatttacacgaggagaatgatgatgaatacaaaagcagaacgtgctattgagctacataaaaaaggatataattgtgcacaggcggttgcctgtaccttctgtaaagagcttggcatcaatgaggaggaaatgttcagaatttcagagggatttggccttggaatggggatgatggaaatgtgcggcgctctttcaggaatgacaatgatcataggactggagaacagcgtaggtgatcctgagaagggagctcctacaaagacacagacttataaggctgtacaaaaatatataaacaaatttaaagaaaataatggttcctatatctgccgtgaattaaaaggcgttgagacaaaaaaggtgctctgtacctgcgataagtgtattttggatgcagtggcgctgacagaggagtatttgaacagtaaaaaagaagcacaggactgacagtaactggaatggaaaagtttcaggggactgtcgggaaataaatagtcctaaacaggggcaggtgtgactcgtatgagccgcacctgcccctgttgcaaaatcagagtaagtccgtcataaattgagggattgagagagcctgaatcgggcctgtgcgcctggttcctttgaggattactctgcggtatttacaaactgactgttgtacagggtatgataaaagccgccttttttcatcagctcatcatgagttccctgttcaataatactgccgtccttcattacaaggatttcatcagcattgcggatggtagacagtctgtgtgccacaataaagcttgtccgtccctgcataagccggtcaaaagcttcctggatcagcatttctgtacgggtgtcaatgctggaggtggcttcgtcaaggatcagcattggcggaagacacagcataactcttgtaatacagagaagctgtttctgtccctggctgagactgtcctctgtgataactgtatccagacggtcaggaagacggcggataaattcccagctgtgagacatttttgctgcctggatgatctcgtcttcagaggcatccggctttccaatggtaatgttttcccggacagtgccgtttttgatccaggtatcctgaagcaccattccgtagctgcttcggagagagtgtctggatatctgatctacaggttttccatccacggaaatggttccggaatttacatcataaaatcgcatcagaagattgatgaaggtggtttttccgcagccggtaggacctacaagagcaattctcctgccaggctctgccttcagattaaagttttcgatcagaggcctgtgaggcgtataccggaaagaaacctgatcaatttcaacagaaccttttacatcagaaagtgattctgacggatcagggctttccggcttttcttccagaagagcgaagattctggcggcgcaggccagagcattttgaagctcagtgattacggagctgatatcattaaagggcttcatatactgattggcataggcaagcatcacagaaagtccacctacagtcagagcgcctcccggaatcaggaaagcgcctgcaagggcgactcctgcataaatcacattgttgacaaaccgtgtggagggattggtaaggctgctgtaaaaaacagcctgctggcttgattctctcagctcctcattgatgcgggcaaagcgctcagacgctttatcctgatagccaaaggcctgaaccagcttctgatttccgatcatttcctcaataagagctgtctgctgtcctctggcgctgctctgacgctgaaacatctggaaagagtgggaagaaataaattttgccacaaaaaagctcaaaggcgtcagcacaattaccatgatggtaatgaccacgttccgggagaacataaaaaccagtgttccgataatggtgacaatgccggaaaacagctgggtgaagcccaggagaagcccgtctgaaagaatatctgcatctgcagttatccggctgataatatctcctgtactgtggctgtcaaggtaagaaagagacagcttctggatatggcggatggcctttgcccggatatcctgcacagtgcggtaggcgatccggttattgataagattcatgatccaggaggctgcgcctgaaaataatacaaccaggagtacctggcgaagccagcgccacatctgagaaaaattcaccttctgttctgcaatgatctgatcaatggcattgccgaaaagtatgggaacataaagctgcagaagcacggaagcggcagccagtacaatactgacaaccagaagaatacggtatcttccaatgaagcgaagcacttttttcagggtttccgtgctttctgtccgttttttattcattgcgctcatgaattggcctcctttccttttgcgggaagttctccggtattttgcattgcgtcatattttttcctttcatcgggaaactgagagaaaaagatctctctgtatggggcgcaggattttaaaagttcttcatgagtgccctgaccggccagggttccgtcgtccagaacaaggatcaggtcagcctgacggatacttgaggaacgctgggatacaagaaaagtggttgttttgtggctgagcgtgtgaagcgattttctcagggctgcatctgtggcaaagtcaagagcgctggcgctgtcatccagaatgaggattttaggatttttgatcagagcccgggcaatggtaaggcgctggcgctggccgccggaaagattttttccgttttgctccagagtaaaatcaagctgtccctgttttttttctacgatttcttttgcctgtgccatggaaagagcttcccagatttcttcatcagaagcattttccctgccaagcttcatgttttcccggatagtacctttaaacagcacggccttttgcggaacaattccgattttgctgcagagatctgcctgagaatatttacaaatatcctgaccgttaagaagaaccgttccctgatctgcatcataaaatcgggagatcagattcacaagggttgtttttccacttccggtaccgccgataatgcccaccgtctggcctttttttacggaaaagctgatattggaaagactgggagccttggttccggcataggaaaaggtaacgtcctgaaaagcaactgcgcagtctgagactggctgtgttttggtttcagttacataatccatggaggactggacgttcagaatatcagctacacggcctgcacaggcggctgccttattcagtgtgatgatcagagaggcaagcttaataagctcaacgatcatctgagccatgtaattgtaaagagctactgtttctccctgctgcatactgcccatatttacctggactccggctgcgctgatcagaaaaacagtggcaatgttaatgagaacataggtagccggattcagaagcgcagaaagccgtcccacaaattcgttaagcctggtcagttcacggttactctcgtcaaattcttttacagcttctctttcccggcagaaagcccgtatcacgcggactccggtaagattttctcttgtaagacctgtaactctgtcaagctttccctgaactttacggaaaagcggaatgctgagatacataataacaaaaacaacaagaaagaggaccgggattgccacaacaaacaccagggcgcagcgtacattaatggtaaacgccataaccatggagcccagaacgataaaagggctgcgaagcagcagcctgagtcccatgttcagtccgttctgcacctgattgatatcattggtcagtcttgtgatcagggtggcggttccaagacggtcaagctcagaataggaaagtccctgtacatgatcaaacacagactgacgaagctctgcggcaaatcccgtacttgcttttgctgcaaaaaactgggcggtgatactgacagtcagacctgcgcctgccataaggatcagaatcaaaaagctccggataatgacaccgcggttattttctgcaattcccacatcgatcatatgagcgatcacaacaggaaccatcaggtcaaagacaacctccagaaacttgaaaaagggagcaagtatggtctcttttttgtagttttttaaatagacagcgagagatcgcatgttctgtttcctccgtttctatataggatttctcagggggaatcctgattgacaacccatattatactcctgtacaatgagatagaaaaggagaaaaataaatgaaaataagaaaagcagagagaaaagatctttcagatattctgagaatttatgcatatgcaagagcgtttatgaaagcaaatggaaaccctgaccagtgggggaacgtttatccttctacggagcttatccaggaggacatggaaaagggaatctgctatgtgtgcacggaaggggaacatattgcaggggtttttgtattttttaagggagaggaccctacataccgggtgatccgggagggaaactggcacagaaacagcccctatggagtgctgcacagagtggcgtctgacggaagtataaagggaatcgcaaggttctgttttgactttgcaaaagagaactgtgattatctgagaatcgatacccataaggacaacattcccatgcagaacactctggcaaaaaacggattctgcagatgtgggatcattaatactgacgacggttccccgcgaatcgcctatgactgggaagcctgagagaaaaatcttacagaggagaattttattatgaagcgaaatgttacactggaagaaatttctgacggaaatttatatgaagcaaacgacatggtaaaggcagactgtcaggactgcaaagggtgcagcgactgctgtcagggaatgggagatacagtgattcttgatcctttagatgtgcacaggctttgtgcgggattaaaaaaatcaccggaggagcttctgggaagtgttctggagctgggaatcactgacggaaatattcttccccatcttgccatgagaggggagcaggagtgctgtgtgtttctgaacacagagggacgctgctccatacatgatatcagaccgggattctgcagactgtttcctctgggacgctattatacagaggacggatttaagtatattcttcagatccatgaatgcaaaaagaaaaaccgttccaagatcaaagtaaaaaaatggctggacactccaaatctgaaacagtacgaaaagtttgtcctggactggcataattttcttctggatgttcaggaggtgttttatgagacagaggatgagactttgattaagaacctgaatatgtatgttctcagcaggttttattatactccatataaagaggacgaagatttttatccgcagttttatgttcggctggaagaagcgaagaagctgttagagcttggagtataacagaaaaagagcagttagaagaaatggaacgaaatggggaacagacctgaaaaaagtattgacattaaaattttctgtctgtataatatgaaaaagttaggacgctaactaaataaattgaggtgtagatcatgcaggatattgatgaaaaaataaggaacatgcatacgggaagactggtgaggatgctgaatcaccagctgaaacggaatcagaagcctgaggaggctgtggaggatgacgagctgacgccgatgcagaggcatatactgaattatattttgctggaaactcttcacagagatatttatcagaaaaatcttgaagaggagttccaggtcaggaaatctacagtatcaggtattctcaagctgatcgaaaaaaacgggtttatctaccgggaaagcgtaaaagaggatgccagactgaaaagaatccttcccacaaaaaaagcagaggctctgcgtccaagtattctggagcatattcatgaaaccgagatccgtatgactgagggtgtgtcagagcaggatctttttctgtgcaaaaaagttctttatcagatgtgtcagaatcttgcagaaaagaacagggagaataaggaggtagacagaaaagatgaataagacacttttacgatcagtccgggaatacaaaaaacagtcagtgctggctccgttatttgtaatccttgaggtcctgatggaggttctcatccccatggaaatggcaaagatcattgatgttggcattgccaaggggaatatcaactacattgtccagcgcgggctgatccttgtggtcatggctatgctggctttgtggtttggcgtgatcgcaggaaaaatggcggcagtggcagcagccggctacgcaaaaaatctgagacatgatattttttataaggtacaggaattttcttttaagaatatcgatcatttttccacttcaggacttgttaccagaatgacaactgatattacaaacgtgcagatggcatacatgatgagtatccgtcttcttgtaagggctccgatcatggtgctgctttcatgggtcatgacattaatgatcaatgtaaaaatcgcgcttttattcttgatcgtgattcctcttcttggcggaacccttatctttattgcaaagaaagcccatccccacttcgtcaaggtgtttgacgagtatgatgtgctgaataattctgttcaggaaaacgtaaatgcgtcccgtgtggtgaaggcttttgtcagagaagattttgagatccgtaagtttcacggaatttccaaatatgtgtatgatctttttacaaaggcggaaaaaatcgtatcatggaactctccggttatgcagtttaccatgtatacggtggttcttcttctggttgctatcggaggaaagagcattgtttttggaagtatggcaacaggagagcttaccagtgtgatcgtgtatgcgcttcagatcctgatgtccctttccatggttacctttgtgtttgttatgatcatgattgcagaggcatctacagaccgtattacagaggtgctgaaggaagtgccggaaatggcagataatgaggattctgtaaaagaggttccaaatggagaaatcgtatttgaccatgtaaacttcagctatggaggaaagggcggaaatctttccctgaaggatattaatcttcatatcaaatccggtcagacagttggaattatcggcggaaccggaagtgcaaagtccaccctggtacagatgatcccccgtctctatgatgtgacagagggaagcgtgaaggttggcggaatcgatgtacgtgattataacctggaagctctgcgggaccaggtatctatggttctccagaaaaatgtgctgttttccggttccatttatgaaaacatccggtggggagacgaaaatgccagtgatgaagaggtacagagagtgtgcagactggctcaggcagacggatttatcaatgagtttccggccggatataaaacccagatcgttcagggaggaaacaatgtttccggcggacagaagcagaggctctgtattgcaagagcgcttctgaaaaaaccgaagatcttgattctggatgattccacaagcgcggttgacacaaaaacagacgcactgatccgtaaggcattccgtgaggaaattccggatactacaaagatcattattgcgcagcgcgttgcttctatagaagatgcggaccagatcattgttctggacggaggtgctgttgcaggtgtgggaacctctcaggagcttcttaaaacaaatgaaatctacagagaagtatatgaatctcaggtacggggaggtgaagagaatgaataagaaacaaaacggaaaaccaaagctgtccaaggatacgttaaagacagcaaagcgccttctgaaatatgtgacagaaacctataaaatgcgttttatcctggtgtttgtctgtattcttatcagctctgtggcaacgatctccgtatctttgtccctgaaatttttgctggatgattttattattccgctgatcggacagcagagtccgaactttacagagctttaccgggcgcttgcagttctgggatgcattttccttctgggagtggtttccacctttatttacaccagaatgatggtttatatcggacagggtgttctgaaaaaggtgagagacgatatgtttgaacatatgcagactcttccgatccgctattttgaccagaggacaaacggctctattatgagtctttacacaaacgataccgacactctgagacagatgatcagccaggcaattccccaggcgctgatgtccttttttaccattattgtcacttttatttccatggtggcattgagtccgcttctgacaattctggctgttgcagttatttttgttatgacttttgttaccagaaagatcggtgggaacagtggaaagtattttgtcagccagcagatgtctctggcagatgtaaccggctttgtggaagagcgcatgaacggacagagagttgtcaaggtatttaaccatgaaagaaaatcagaagaagagtttgataaattaaacgaagctctttttgaaagcgcttccagagcaaatacttttgcaaatatgatgggaccggtaatcggaaatatcggaaatcttcagtttgttcttacagcagttctgggcggtttcctttctgttatcggagtaggtggaatcactcttggagttatggcttcctaccttcagtttacaaaaagctttactcagccgtttatgcaggtggctcagcagtttaactccattgttatggcgcttgcaggagcagagcgtattttccagctgatcgacgaggagccggaaaaagatgaaggttatgtgactcttgtaaatgccagaaaggacgaaaacggaaatattacagaatgtaaggagcgcacaggaatgtgggcatggaaacatcctcattctgcagacggttctgtttcctatacagagctgaccggagatgttgtttttgagaatgtgacctttggctacaatgaagataaagtaatcctgaaaaatatcagcctgtatgcaaagcctggacagaagcttgcttttgtaggctctacaggagccggaaagactacgatcaccaacctgatcaatcgtttttatgatattcaggaaggcaagatccgttacgacggaattaacattacaaagattaaaaaggatgacctccgccgttctctgggaattgtcctgcaggatacgcatctgtttaccggtacgattatggataatatccgttatggaaagttggatgccacagacgaagaggtttaccaggcagcgcgccttgcccatgcagatcagtttatccagatgcttcctaatggatatcagacaatgctcagcggtgacggtgaggagctttcacagggacagagacagcttttgtccattgccagggcagcagtggcagatccgcctgtactgattcttgacgaggcaacttcaagtattgatacacgaacagagagtattgtacaaaaaggtatggacaacctgatgaaaggacgtactgtatttgtaatcgcgcacagactttccacaatccgcaacagtaatgcgattattgttctggatcatggaaatattattgaaagaggcgatcatgaggatctgatcaaaatgaaaggaacctattatcagctttatacaggaaagctggaactgtcataaaaacacatatagctacaaaaaaagagacactgcacaggaaatggatgttccggggagcttcccccggagcgcatttccggatgcagtgtctttttttgtaaatatttttaaaagacagaagtaatgatctgagctgcagaaggcttattagaaacagcctgatcaatgaaaggaagttttttattctgcagactcagaaagattacaggaattttctgagaggtacagtaagaacccgaagagtccagtagaagattttctttcctgtactgagtttttttggaacatagttttcgccctgaatatagtttccgtcaggtcccatggttttactgtaggtcttgtctgtttctgcttcttttcggatcatggaatttaatttctctgagtcaatggcaagcatcagctctgtatcctggtaggtgcttctcatatccagattgtaggagcccacaatactcattctgtcatcgatcagaactgcttttgtatggcaggaatgaccgcccataaattcataaacctttgcgccggttttccagattttttctttctggttcagataatccgtgcatccccaggggtttgctccgctggcaacatcattggtaatgatttcaaggggaatattgttgtccttcaggtctgtaagatcctggtacatctcttttccgcagatgatatagggggtgtagataagcgtttcttttccctgaagcataagctggtggatggaataccacatccagggctctttgttttctgcttccagaggattgcagagaagggaaattttatttgtctcaaaggtgagcttctggaaatcccagtccgtataagccttcggatatgtttctttcagcttctgataacggttgttcagagacgcaatacattcctgaatttcatcagaaagttttttgcaggtaaactcccggctgtccttcagagcccatattttttcaaaataagctttgagctgatagagagaggaagctttattatcttctgtctcatacacaaaaatttctctgtcaatattttttgatttggagtaatccccaagaaacagattggttgtatttcttcctcccagcaggaacatctgatggtcaatgatcagatatttgtcatggagacgggcctgcattttccagggctttaaaggcgtgagcggattgtagatgcgaagagaaatgttcttatgggaggccagagcctggaaccactgggttccttttccctttacatccagaaaaccgctgaagccgtcaatgatcacccggacttttacgcctctgtccgcggcactcataagcgcagccataacatcttttccgcctttgtcggcgttaaagtcaaaggtagagagaataatttcctgctctgcctgttcgatcatctgaaggcgatagagaagagcgtctgtgttgtcgtttatgtaggcaatccgctcgcttcccgcctgggagctgtaaaactctctctgactgaagtcattctgaaaattttctgaaacttttttgtgccgcagataaggcactgtaagcagagcaatatagattaaaataagaataaaaataatcctgcccggtgtcagaagcccaaagaaaaacctgcgtttcatgttcattcaccactttcttttttctaactggtatgacagttttatagttgtaatgaaacattctatgccaaatcaggaaaaaagtaaagaagaaaaatgttaatctttcgtcaatttttttagaggattcttttcattgtgatttcagagattttctgatattctagtatagtaacaagtttttctgataaaagaaggtttttaaaacagcttttatatcagcaggcaggtatgtactgtacagccatattttatctgaatgcagaaaaaggtaaaatcgttcattgtaaaatgcctgtgatcttagaagctgtaagttggttaccaaaaatgattttataaaaaataacagaaacagacaggagaatagataatggaaaatcaggaaaaaccacataaacgccgcgtgcgatattccggaacccacccgaagcggttcagtgaaaaatataaagagcatcagccggaaaaatatgcagatgtggtagaaaaagtaatacgaaaaggaagtactccggcaggtatgcatatttctatctgtgtgaaggaaattctggattttcttcagatacagccgggacagcgcggcctggacgctaccctgggatatggagggcatactctggagatgctgaaatgtctgaaaggagagggacatatttacgggctggacgtagaccccattgaatcagaaaaaacaaaagagagattgaaaaaacagggattcggagaagatatccttacagttaagcttctgaatttcagaaatattgaccaggtagcagaggaagcagggaaatttgattttgttctggctgatctgggagtatcctccatgcagatcgacaatccggagagaggtttttcctataaagtggacggccctctggatctgcgcatgaatcctcagaaaggaatcagcgcggcagagcgtctgaaagaggtgactcaggaggagctttacggaatgcttctggaaaatgcagacgagccctatgctgaggaaatttcaaaagcggtgatccgtcagagaaggattcgtcctattgaaactaccacagatcttaaacaggtgatcgagcaggctttaagctttattccggaaaaggaacggaaggaggctgtaaaaaaatcctgtcagagaagctttcaggcccttcgcattgatgtgaacagtgaatttgaggtgctttatgattttctggaaaagctgcctcaggtgctggctccaaacggaagagcggcaatccttaccttccattcaggagaggatcgtctggtaaaaaaatcttttaaacagttttataaggagggaatttacagtgacatcagcaaaaatgtgatccgtccctcacaggaggagtgcgccagaaacagccgcgccagatctacaaagatgcgctgggcaatccgggcacaggaaatttaacagaagagttatatcaggcagggcataaggccctgctttttttataaaaacttcttgcatataatacggattcgtattataataccaaataaacaaaatacgaatccgtattataaagcaaagagacagatgaaacgaaagacagtatctgctctgagaaaagggaggaacagaaatgaagcaaatcagagaagccatagacaggatgaaccaatgtatgaaccgtcttgaccgtttgtattacatggctgcaagaaaactgggggttaaggacaacagcctgcttctttattatgtgctgagtgatgaaaaggctcattctcaaaaagaaatcagcgaagaatggctggttcccagaacaactcttaatacagtggtaaaagaagcggtagagaaagggtatatcagactggaaactccgggcagtacaagagaaaaaacacttattcttacagaaaagggaaagctatatgctgcaagcctgctgaacagagtttttgcagcagaggaacaggccctggaacggactctgagagaattttcttcagaccttatgaaaggaatggaggtgtttacggattacatgcaggaagaatttcaaaaggagatatttgataaggaggagctgccgtccggggaataaacggagggtattgacagaagttatggattcaaagacattatttacaaaaatatcaccggtaaagctgttttttattgcgtcggttccaggcgcagtgagtatgctggcttcagctctctatcaggtaatagacgggatactggttggccagattctgggagaactggcttttgcagccctgaaccttgccatgccctttgtgatcattaatttttcactggcagatctgattggtgtaggttccgcagttcctatttctgtaagtcttggaaaaaaggaaacaaaacgcgctgataatatttttacctgcgcctgtataatgatcgtaggcgccggagtgctgatcggaaccgttctgtatgttctggcagagcctcttctgaagcttatgggggcacagggggagcttcttgagctggcagttcagtatctgagagtatatgccatgtgtgccccgattactactattatttttgcagtggacaattatctgagaatctgcggaaaaataaagagcagtatgttcttgaacatatttatgtctgtactgacagctgttctggagtttacgtttttgtacatattcaaatggggaatctggggagcaggacttgcgacctgcgcaggaatgtttgtctgctccgcagcagccttctggccgtttttccggggcaaaatggagcttcatttctgcaggccggagttttctgtaagtatggtaaagcagatcataagctgcgggatgccgaactttctcaacaacattgcagggcgtgttacatctattctgctgaacattttgcttttgcgaatggggggagcgcaggcggtatctgtttatggaatccttatgtatgccgaaggctttgtacagcctcttctttatggcatgtgcgattctctgcagccggcagtcagctataatctgggagcaggaaacccggggcgtatccggtccattgaaaaatgctgttatacggcaagcgcggtcatatcatttttatctgcaggaatattatttttcttccctgaattgatcacgcggatgtttgtaaataatccggatgcagcttttatggaaatgtcccggcaggcagttatgctgtttgccctgacctatgtgacaagatggttttcctttgcaactcagagttatgtggtagcggtggaaaaagcaaaagaggcaacactgatttcagtttctacggcgctgatcttcccggtggttctgatagtagtcctgtggcctttgggacttaccggaatctggctgaactttgccggaacttcggtgctggccggaatcatgtcatttgtgattttgaagaaatcgtcagtcagatcagcgagctgatggtggtttggcaggttcattgctgcaccaagcttttcgaaagttcagaggagtgcagccttcgtgttttttaaacagacgaataaaatggctgacctggtgaaagccacaggcaaaggcaatttcttctacggaaatatttttatatttcaataaaactttggaatggtttaggcgtgtaataatcaggtattcattaggtggggtgccgatataacgtttaaattctcgagcaaaatggtatttgcttatgcctgttttgtctgcgaggtattctaaagtaagtggctcgcggaaatgggtatctatttcttttagagcagtattcagaaaatcaggcattaatccaagacaaagctgttctgtttcattttcaattaaaatctgtgtgagaatttcagtaatcaggctagatataaggatctctgaatggagatcctttttttgtgtaatagaaagaatacggcgcagggtactttccataaaaaaaggatcaagggaatccagaatacggaaattgttgcgtagaaattcttcgtaatatcctaatgcagaaggaccattaaaatgaagccataaaaatttccactgctgttttttgagacattcataatagtgatggttcatacagtcgatataggcaagagaaccggggaaaagggtaaaagtattgttctgatattttaacagaccttttccggacaaggtatatattaaaagaaaactgttcagattttctctttctgtaaagtaagggggaaaagtagagaaatcacctgcttcctgtacataaaagaaggtctgacgggctttgggagtggcggtgttgataaaacgaatagaatcgtctgtccagctgaagttcagattttccatatattcatgtgtagctgagtttctcataagaacctccagtaaaagcaagattatgatattttatgcaaatatagtttgatgtattctaaattatatcagtatataatcaggttgtaaacgatgaaatacgataacaagattacagtataaggagtgaaaatatgagcaatctgaaaaaaataaaagaacctaaaagagccagaattggtttctacagtgctggcttatgcacatattgggaacagtttgaagggctttataactgcctgatcggatataataaatttattgaaaagaaactcagccaatggggtgaggtttataattttggaatggtagatacagaggaaaaaggcagagctgcaggagagttttttaacaaaagtaatgtagatattgttttttctcatacagctacttactatacaagtgcctgtgtgctgccgatacatcagatcaataaggcgccgacagtgattttgaatttgcagcctacaccagaaatggcatatgagtctacaggtacagatcgttggttggctcaatgtgtaggatgttctgtgccggagatttcaaatgcatttaatcgagctggtattccgtttcgtgtagtaaatggattacttggactttatgaaactccgacatttgccaaggcagatgaagtgacggagaaaaggccagaagcaatgaaagcatggaaagaaattgaagaatggtgtgtagctgcttctgtacaaagaacattaaagtggagcaggtttggacttttgggaggatattacagcggaatgctggatatgtacagtgattttactatgctgcaggcacagacaggcatggacgttgaaattttagagatgagcgatctggattattatctgaaatctgtgacagagaaagaggtacagcaaaaattacagcaaatacaggatttttttgaaatttccggggattctccctcagatcctattgcgagaaagccctcacaagatcaattaaactggtcagccagagttgcatctgctcaggagaaaatggtacgtgatagaaatttggacagtgtatcgtattattatcatggacgagatgattattttgaaacagtacaaagtggatttattgtaggattttcactgttgaatgcgaggggaattgcatgtgcaggagagggagatataaaaacagctctggcaatgaaaattgcagatatatgtggtacgggtggaagtttttgtgagattgttgccgctgattttaacagagacaccatgattctgggacatgatggtccatttcattttgcaatttcaaaagggaaaccaattcttcgggggatgggaatttatcacggaaagcgtggaagcggtgtttcggtagaagcaaaggtacagccgggaaaggtgacaactcttggagtaacacagacgagagatggccatttaaaatttaacattagtgagggagaagcgattgatgcaccgattcttttgaatggaaatggatgcaatctgtattgcaggtaatgatgaaaatgcacttcaggcatgtcttagtgaggcaatggacgctggaattaaagtgtcttgtctggatgcaaaagttaatcctgcaagcagaatgacttttgtaaatcaagcaggaacgaaagagataggggaagccttgatggatgcggtgctggatatttccggcggagaaggacaatgggcgatactttctgctacttcacaggctacaaatcagaatgcatggattgaggctatgaaagaagtgatgaaagaagataaatacagtaagctggaacttgtggagattgcatatggcgatgatgaaccacagaaatcaacagatgttacacaggcacttttacaaaattatccggatttaaaggtgatctgtgcaccgacaacagtaggaattgcatcagcggctaaggtacttcaggattcaggggcttcctgcaagctgacaggcttgggattgccttcagaaatgtctgaatatattggtgatgatgaagcccattcttgtccatatatgtttctttggaatccagttgatgttggaaggttaggtgcctatacttcaattgcattggtaaatgaagaaattacaggagtatcaggagataaattcactgccggagaacttggtgattatgaagttattgaggcgtcagatggaggaacagaagtaattctgggagctccgtttaggtttgattcgtccaatattgatgagtggaaggatgtttattgatttggaaattcattgttaattggaaatacccttggaatcgggaataacacagagacattagtgtgctattcccggacaaagaaaatcagaaggcactatttcggaggaagaaaaatgataaagggatttcttgtaaattttatatctatttttagattatccacataaatactatgttttcaagtattttgaagtatagaaaatcattcattttaccacgaatttaccacgattgattgagccttgatatgacaataaaatagcgctaaaaagacacccttaacttaagcggtgtctttttatgtacggatatgaaattgtcaaactgagatttgtacttctgaacagcttggatttatctatttcacgataaatctataaattgcataggcaacccatataatccaagaaaaaaaccacaaatcaaagagaatacttattgttaaataaacgatagcaacagcgattgctattatccaatttttctttttagtatattccataatcaaccacctccacaactgcaaatctatcccagttatataaactgggattgaacaaaatcgctgcgcgatggcctgccaaggctgtggcatagcgattttctttttctataacaaaacagtggaaagcaagtcctaaaagtagtattgttaaatcaccacaaaataacaattaaacaggatcgacctctccactgcctatgaaaagaataccacccttccgcttgattggcaagcgattttatgaccccaatgcacctccgtataaagcagtgtttctgataactactgattttatatggaggattttattatgtatgaaaaatatttagaacagcttgaggaagctggaaaaatccgtaacctcaaagaacgttccatcagctgctataaaaactatgtttcttactttctgaaatatcagaataagaatcctgaagagcttacctgtcaggatgtcaggacttttttgcttgcgaaaaaagaggaaggactgaaagccacaactctgaatctttataattctgccatccgttttttctatcggaatgtcctgcatatcctttgggatgatatcacagttccacgtatgatcctggaacacaagcttccgactgtactgaccacctctgagattaaccgtctgttagatgctgttgatgatattaaatataaggctatgttcgcagtcatgtattcctccggcatgagagtttctgaagtaatccaccttcactatgatgacatttcccgttctaatatgcagatccatgtccgggatacgaaaaaccggatggaccgctatactattctgtccagacgttgtctggatatccttacacaatactggtttgagaaaggacgtccccgtggcatcctgtttccaaataaatttaccggtaattacctgactgtcaatactctggaacaggtcatgcggcgggcagtagccgatgctgaactttcaaaggcggtaaccccgcactgtctccgccatagctttgcaacccatctgatggaacagggcgtagaacggcagaatattcaggcactgcttggacaccgtgacccgaaatctacggaagtttatcttcatgtcagcaacaaatccctcatgggcattcaaagcccttttgacaggaaagaaggtactggccatgaataaacccaccgtccaggatattttccgacgtttttatccggcataccttgaaaagtattctccatccccggaacaggcaaaagctgtccggaacatcctgaactgcaaaacaggagcctatggtgcaaatatcagtgtatgtgaagactgtggtgctgtccagattcattataattcctgtcgtaaccgctgttgtcccatgtgtcaggctattccaaaggaaatgtggatggatgctcgcagagaagatgtacttgatgcaccttatttccatctggtgtttacagtccctgacattctgaatccggtcatttacagtaaccagaaactgttatatgacacgctgtatcatgcggcttccgctactattcaggaactgacagccgacccaaagcacctcggggcttctgttggttatatctgcatcctgcatacatggggctcagaaatgaattttcatccccatatccatacgatactgcttggcggcggcctgacaccgaaaaatgagtggaaagacaatggtacggagttttttctccccatatgggctatctccaaagtctttcgtgggaaatatatggatgagttgaaaaatctctggaatacagatcagcttgagtttcatggaacagcagaaaaataccgtaattattatgaattcaaagagcttatagattcctgttatgacgcagaatgggttccttactgtaagaaaacttttaacggtgcacaatctgtgattgattaccttggaaagtatacccataggatcactatcagcaatcaccgtattctccgtatggacaaagaaaatgttactttttctgtcagggattaccgaaaggaaggacaatggaaagaactgacactttccggtattgaatttacacggcgttttctgatgcatgtgccacccaaacgctttgtcaggatccggcattacggacttctatgttcccgcagcaaacacaaaaaactcactttatgccagaatctccttggatgcaaaaaatatctttcaaagctcagggataaagagatgccggaaatactgaaacagctatacgggataaacatctgtgtatgtaaatcctgcggcggacatcttgggaagccccaacttcgaatgccgcaaaggtgttaaaatacactttctttatatgttttttaagcctcaaagtcagaggttttattgttgtacctatttatctgaaaacacttgatttctgtagcgtctgcacaggaaatcctgtataattatggataagaagaaaagattgaaagtccataggtagcagctacccggacgctcactttgttcaattaggtcaaatcgaaaatggagtaaacgaaggggcagttcactggaatgccaaaactgctttttcgtttaccccatcatcgattctaacctaaagaatttgtcaatgaatcacctcatagcgtaatctaagatacgagttctccaaaactacacattcttgcaacttcacaacacccaattttgataattcgcattcttctgtcaaagactttccatcaattagagtagaagtatccttgccgccaatcaaaacaggtgcaataataatatctacataatcaaacagcttttcacgaagaaataagttattcaatgttcctccagtctggattgttattctctcacaaccatattccgatttaagttttataagtgcatcttttaaggataattcattttggtatatgatatgaagattttcatcctctacgttaaaggcaggatgtcttgtattcgtcgtaatcagcacaaactcttttgataaagcacaaaaatagcgaataccattttcattcaaatgtttattatcaattacaacaaaggaaaccggtgttttccttggtattttctttttatttactcccattttttcttgcactctacccgagttgaaagaccacaaatctgttgtctgctctatttcgtaatattggtgtaatccctcattaacgcctttaattttaggaaaatccttatctacatccaaatcatctgttgcaccagtacttattttcccatcaacagacattagcataaacaatgttgtaataggtctatccattttatctttcctccacaaattccaattcgctttcttcatatccatattataacagttccatatatccgccacaacaaaaatcagcataccctttgatatttttctgccttgaaaatgcacacttctttcttcctcttgattacccaacacagaaaagaaaaaaggctactcgtcctcattatcaaaatgattattccttaatacttcccgtaacagttccatatcttcttttgaattggggtttatcatttttacaacctgataaggcgtaccgtacttgtgtccgtctgtgctttccccaaacatatccatgctgtataaatcatcatagcggtttaatattttctgaaatttcaagtgctggataaattccttgatagggtaaaggtcggacgcttgtatctccgttccgttgatatagtctgtgatgtatttccgcaactgttccagctcatactccagccattcttcttcgctgtcaaagaagttatcatagtgtccatgtttcaactctgcatttaggcgttcttccgtccttaaaaactggcagacttccttttcggcttgattaacatacttccattttcccgacaataattcattgggcgttactcccagcacgtccattatcttttccagcgtatcaaaggtaggatagtttacccctctttcaatcttggaaaggctctgcatattgataccgattttgtccgcaagctcctgctgtttcattttcctgtgttttcttatggtctgtatgttctctcctaagaaaatcattttctttatataaccctccataacttagtataaccgctcctttcgttgcttttctttctgtttataagcctatcatacttattttattttgaaaagtcaataaaaacttcttgacaagtaatcctgctggcgttattatcgtatcagatgaagtgattaagcacgctagggtcaatcacacacttgagtaagcatatagatgagttgttttcgctttgacagcatgaacaggcatggactatcagaccgaaaatcatggtttccaaaaggggctggctggacgggacacgtcccccagacgtggagcggacagacagttccttttggaaagggaacgcctttcggcgttcgcagagggcgtatatgtaacaccgccctgcgtatacatgtcatagtacctagaaactgtgataaataaaggaaaaaatgcaatttataccccgcaaaaaatcggggcatacgaaaggagcaatgcactataactacacacaaaaatttatccgttaagattgattacatcagcattgtatttgatactgcaaccgccgaagatgtcatcatgcacattttaggtttaccgactgacattttcaatatctatccggcaagcattaaatacaaaacctatcaagcacgctggcagattggagatatttatgtatcgggggacgcaagaaaaacagaggataacccacaagggttaggctgttatcttgttatgactggcagaggttgtgatgatattttccgtattctcaacagcagaaactatacctttggggatatgttcaaacattgtgaaagaagatacggactggataatttccacttcacaagacttgatattgccattgatgataagaacgaaaagccattctttaccatagagcagataaagaagaaatgcgaaaaagaggaatttatttccaatagtgagggctaccactttgatgaaagcaagtttgacgatttcgacaccgcaaaaacggtttatatcggtgctggaaaatcgggattgtcctaccgcttttatgacaaggataaggaagtctgttcaaaacataataagacgcttgatgaagtcggcagttggaaacggacagaaatgcaactgcgtgatgataaggctcatgcctttgccatgacattcaaggacagaccgttggaactgggagaactggctttcgggctattggcaaacaacctacgctttgtcgtaccaaacagaaatgaaagtaataagagcagatggaaaacatgtcggttttgggaacgctttttaggggctgtggaagtcttaaaactgcaagtaccgaaactacataattctcttgaggaaacacagcaatggcttacagagggtggcgtgatttccgctgtcaaaagtttttacttcttggaagaacatgacgcattaggtggactggaaaaagtgggaactatgcttgataaggcaagatacagcacttccctttccagtaaactgaccgctcacttacagaggataaaccgcaccgaccttatcccctatatccagtatgacacgaaacaagggaaagggggtatctgatgaataacaacgatatttccgtatgggaaaaatacacccttaccattgaagaagcgtcaaaatatttccgtattggagaaaacaaattaagacgcttggcagaggaaaacaaggacgctggctggctcattatgaatggcaaccgcatacagattaaacgccgacagtttgaaaaggtcattgataaattggacgcaatctaatgcaaatgagccttgtatgtgttatgatgaacacaagtcatatcaaggctctttccaacaaggaaaggagcagacaccatgaaagaaaaaagacgggatagcaaaggacgtatcctgcatactggagagagccaacgaacagacggaaaatacttatataaatatgtggacgcatttggaaacacaaaatatgtgtatgcctggagattgacacccacagacccaacaccaaagggaaagcgggataaactctcacttcgtgaactggaacagcagataagacgggatattgaggacggtatcgacagcacaggcaagaaaatgacgctttgccaactctacgccaaacagaacgcacagagggcaaatgtgaagaaaagcacacagaaacaacgggaacagctcatgcggttattgaaagaggacaagttgggtgctaggagcattgatacgataaaaccctctgacgctaaggaatgggcgttacgcatgaaagacaaaggcttttcctacaataccattaacaaccataaacgctcgttaaaagcgtcattctatatcgccatacaagacgattgtgtaaggaagaacccttttgatttcaagttgagtgaagtcctagaaaatgataccaaaaagaaagtcgcattgacagaggaacaggaacaagcactactgtcattcatcaagacggacaacgtgtatcataagtattacgatgatgtactgatactgttaaagacaggacttcgtatttcggaactgtgcggactgacagtagccgacattgatttcaaaaatgaagttgtgattatcgaccaccagttattaaagagcaaggaacagggctactatattgaaacgcctaagacaaagagcggaacaaggcaagtgccattaagcaaggaaacgatacaagcatttcaacgggttatgaagaaacgcccaaaggcagaaccatttgtgatagacggacggggcaacttcttatttgtcaatcccaaaggcaagcctaaagttgcgattgattacagcactttatttgtccgtatggtaaagaaatacaacaagcaccacatggacaaccctttgccacatatcacaccgcatacgcttcgccatacgttctgcacaagactggcaagcaagaacatgaacccgaaagatttacagtatatcatggggcattcaaatatcagtatcacaatgaactggtatgctcatgcgtccatagataccgcaaaatcagaggttcagcgtctaattgcatagaagtatttaccacgattttaaccacgattgacagggaaaatataagaagataagcctagatatgtgaggtttaccacaaaggcaaaatgcccgtagagccgataaaataaggctttgcggacatttgagaagatataaaaagatagttaaaaagacatatataatttagtgataaattatatgaaggtcaggaagtggaatatgaaaaacgtcataatcttctctggccggaaatgaaagagatgatacataggtatggtggaaaaaattacacaatttttttggatcccaattcattaatactttttggttatattgagattgaggatgaaaagctttggcgtgagggcgcagaaacagagataaataaaaaatggtgggattatatggcagatattatggaaacaaatcccgataatagtcctgtttgtgtgaatctcaaaaaagtttttcatctggattaaagtaaataaaaatgtgacggctcaaaatgcaggttatatattatcgaaatgtaggtattatataatctgcatttttataggattaaaaaagtgatgcggtttatgctgctgtgatagaaaatatttgcatgagtattttaggtggaagatgtaaaattttgttatagatgtagtgaaaactttttgaaatatgaatttatgagagtatggcttggaaaaagcattgatatatataatgaaaaaatgtatatctcatagaatttaacagaaaataatgttatactacaaataaaaacagttaatataggcgaaacagaaaattctgagaaacggggtgagcatatgctgaaggaatggatgccgggtgagattccggaaaaacgggaatttgaggagcagcttgataaaaacaggaacaggctttatgatctccagacaaagatcaaggagcaccggcttccggtgctggtactttttgagggatgggcagcggctggaaagggaagtgtgatcggaaaggtgataaaaaatattgatcccagattctttaaggttgcaactatggcatctccgtcagaagaggaacttcgaaagccttttttgtatcgttacatgaagcagattccggaagaaggaaagttcacttttctggattccggctggatggagcagacaacagaagaggttttgaagaaaaagcttacggaagcagaatatgaaaaaagaattgaaagtgttcggcgttttgagcggcagcttacagataacgggtatctggtgctgaaattttttatgcacattgacagagaagaacaggattcccgcatgaaaggtcttctggaagaggaggacacaaagtggcgtgtaacaaaatttgatcggtggcagaataaacactatggaaaatgcaaaaaagtgtttgaccgctatatgaaggatacgaatcttccttcctcgccctggtatattattgatgcaggaaaccggaaatgggcggagcttcaggtgctggataccatgatcagcagtattgagattgccatgcagaaccgtctgcattcttcgcctctgcttcagaatgtttttcctctggtaaaaatgccaaagctggcagaagtagagcttcaggggaaagaactgaacgaggaagagtatcatcatgagctgaagcagcttcagaaacatcttggggagctgcataatcgtttataccggaagagagtgccggtgatcattacctatgaaggctgggatgcggcaggcaaaggcggaaatataaagaggataacaggagctctggatcccagaggctatgaagtacatcccattgccagtccggagcctcatgagaaggcccggcattatctctggcgtttctggacaagacttcccaaagacggtcatattgcgatttttgaccgcacctggtacggaagagtgatggtggaacgtctggagggcttttgtacagaaaatgactggaaaagggcatacaatgagatcaatgagtttgaaaaggagctttctgactggggagctgtgatcattaaattctgggtgcagattgacaaggatactcagcttgcccgttttacggaacgccagaacaatccggagaagcagtggaagattacagaagaggactggcgcaaccgtgaaaaatgggatctgtatgaggatgcagtggacgaaatgctgaaaaagacaagtacctcttttgctccctggcatattttggaatcagtggataaaaaatatgcccggatcaaggcacttaaaattgtcataagggagctggaaaagcatatttgaatgaaatgtataaagaaacagatgaaaagcattcagattaatataaaatgccagtttacaagattcaattctggaaatataatttgagagatgtggaattgatttcacagaacaaaagaattttcaggagagaatatatgagcaaaaaagttatttttctggatatagacggtactctggcggagcccggacacagcgaacctccggcttctgccattgaagcagtaagaaaagcgcaggcagcgggaaatctggtatttctttgcagcgggagaaattatggaatgctgtcctcttttttagagtacggatttgacggggttgtggcaagcgccggaggatacatcctgtgcggtgaaaatgtcatttatgattgtcctatgacagatacgcagaggataaagactatggacaccttaacagaaagcggtttatgctggattgcagagtgcagagatgaagcttatgccagtgacagctttaaagcctttgtggaaaaagatgtagatgaacaggtcagcagcgaatttcttcgatggagagagtttgtaaaaaagactttttctattcgttctatagaggaatacagaaatcagccggtctataaatttgtggcgacaagcccttctatgaaaagactggacgctcccaggaaggcgcttgaagaagagtttttgttctgtattcaggatgtttctcatggcgtggtaaatctggagctgatcaatcgtaaatttaacaagggaaccgcagtgagaaaggtatgtgagtatctgcagatcccggtcagcgattcagtaggcttcggagacagtatgaatgataaggaaatgctggaaacagcaggcttaagcatttgtatggaaaatggaagtgaagctgtaaaaaggattgcggatgaggtttgtccgaaggtaactgaggacggaatctggaaagcgtttcagaagcatcatctgatgtaataaaattcgggcataaagatgcctgagaatatcataaagaaagagaccctggagggacaatatttagtgattttgtcttctcagggtcttttttatacaataaaaagtgcttcacgaggatacatgcttgcggatttccgtaggggtggcatgaaaccgttcagaaaacattcggcggaacagcttataattggtaaagccgtggcgttccagaatgtcagatattttgtcactggtggaggtgacatccttataaatctttgacagacggatttcgttctgatattccagaaaggtgactcccatgcattttttaaaaaaacgacagaagtatttgggctgcaggatggcaactccggaaatctcttccagtgagatcgggcggttgtaattggatgcaatatactgcagtactggttccagacgttccagattacggctgtgctggacagtgtcttttttgggcgcttctgtgcagaaattatgataaagctggaacagagtctcaaaaagcagactgttaaaccggagaacagctccgtcaggctgcaggtctgtgagaaactgcatttttatcagtgtctccttaaaaagctccactttgctctgcagaacaggtgaggctgccggatcctgaaggctgaaacataaatttcttgcatggggaatgaatttttccatgaaggcttccggaatctgaaaaacaattgcccggttggggctggtacacagagtagagtgaatctgatttggagttaccatggcgcactgaccggctttcagatttctggaatcatttcccacaatgactttcagctcaccttccagaagatatacaatctccacggcatcatgccagtggggagccacatagctgcccggatctatggaggtaaaaaagcgtacatttgtcttatcatttaatgggatcagctcatagttggtgggcgtcagtatttttttcataatctgtaacctcctttcctttttataaaaagatactattaacctgttgataagatactatcatatctggcagcagaggagcaagtgttttatgatatgcttatcaaataggttacaacaagtaatctaaaggctgttctgggcgcgcagagacaggaaaaatacaaatgatcacacagaaatttaaaggaaaatttctgaataggaggagaataatgaacgaaaaaagaaaactgactccggcacttctttttgaacgcttctgttacggctgcggagattttggctgcaatattatttacacggcaatgtctgcgttcctgcttttttactatacagattacgcaggagtaaatgcggcggcagtaggtacgatcatgctgatatcccgtgtatttgacggaatcagcgatattgtcatgggaatgatcgtggaccgtacaaaatcaaagcacggaaaagccagggtgtggattttgagaatgtgtattccgtttgcgctggcaggaattcttctgttttccgtacctgcttctcttggctcaacagctaaacttgtttatgtatttattacctacaaccttgtttctactgtggtttacacagcaattaacgtaccatattcttcactgaatgcgttaatgacacagaacccctatgagagatctgtactgagtattttcagaaatcttctggcaacagcaggaaccttgacgattaatatggtgacacttcctctggtagagtttttcggcgataatgcggctgcctggacaaaaacctttgcagtgctgggaattctggcagtgattgcttttcttcttacttttatcggaaccaaggagagagtgcattctgttgcagagatcagcggagaagcagagccggtttcctttgcggaaggaatcaaatctctgttcgcaaataaatactggatcatgatgacctgtgttctggcattatttttcctgtattatgcagtaaacggaggaacaactgtctattatgcaaaggatatccttggcgataaaaatctggtaagtacaatcaacggaatttacaatgccattcagattgcggcaatgttttttattgcaggacttgtaaagaaattcggaaaaagaaatgtattctctctgggtctgattctgtcagctgttggaatgctggttctggaatttggcggaagcaccatgccggtgatcgtaatttccagtgtgatccgtggaattggaaatgcctgcggaggagcgacaatctgggcaatggtttctgacactattgattatggtgaatggaaaaccggacaccgtacagagggactggtaaacagcgcctgcagctttggctacaaaatcggaaacggcataggctccgcgcttctgggtattatccttgaaatcggcggatacgtgggagaagcggcagtacagtcatcttccgcactgttttctatcagactctgttttgtgtggattcccattgttgtatttattgcctgctttgtgattttgcgtttctataatctggataaagaatttgacggcattatccgtgatcttcatgagagagctgccggcagataagtatacaggaggtaaaaatgattcagaatccgattcttccgggatttcatgcagatccctgtatctgcagaaaaggaaatgatttttatattgcagtatcttcttttgaatggtttccgggaattcccatttaccattccagagatatgaaaaactgggagctttattcccatgcgcttcagaatgacagggagccggatctcagaaagcttccaagcgcaaagggtatctgggcgccgtgcctgacctactgtgaggcagatgagcttttttatgtggtatacggtgttatgaattccatgaatgcacgatattttgatgtggataattatcttattaccgcaaaggatcccaaaggtccctggagtgagccggtttatcttcattccaccgggtttgacgcctctatgttccatgacgatgacggaaaaaaatatatcgtggcccttgactgggaaacaaggacagcttatgaaaaacccgggcctatcaatatcgtagagtatgatccggagaaaaaaactattgtgggtatgccaaaagctttctggagaggaggcacggacagaggatgtatagaagcgcctcatctgacaaagcgtggggattattactatattatgtgcgcagagggcggcaccggttattatcacagcgtaactgtgggcaggtcaaaaaatatttggggaccctatgagccggatccctgcaatccgatccttacatcaagtcccggagattttaatgaacggtcagactgggatcatttaaaacccaggtattataatccggacagtgtgcttcaaaaatccggtcatgccagctatgtagatctgtcgaacggagagacctggatggttcatctgactgcgcgtccgtttgtgcctgagcttcgctgtactcttggaagagaaactgccattcagcgtatgaagtggactgaggatggatggcttcatatggagaagggcggcaatatggctcaggagtttgttcaggaaagtactcttcctgagagcccggcaagtaagcttccggctcatgatgattttgacggggaaactcttcagatcggttattatgcgccgcgaattgatccggcaggctttgtggatcttacctcaagaccgggatgggcgagacttcggggacaggaatccggatgctccttaaaccaggtgagccttcttgcaagaaagcttaccagcgtgcaggcccgcattaccacaaagcttgattttacacctctttcctatcagcatacggcaggattgatcctctattatgacaatatgaattttatttatctttataaatatttcagcgatactctgggacatggggctgtttccgtacttcaggtggaaaacggcgaaaaaaaggagttcagtgatgcccggacccttgtggaggatgactgtgaaatttatatgcgtctgcagatcaatggcagaaaatctcagttccggtggtctatggacggggaacattatacagagatcggtccctgctttgacaccagtaaattttctgatgagtattcacagtttggggaatttacaggggcttttgtgggaattacctgcggtgaccgcatgatgcaccgtcacacagcagactttgatttttttgattacgaggcagacgaaactgcggcagtagaataaagggaggcaggaattatggtaaaaagaaaagtaaaactggttaatatcagcgatgtggagagctttaatgcaatctgttcgaagtttgactgtgatatggatctttccagtggaaaatattatgtgaatgcaaaatccattatgggaattttcagccttgacctggatttgcctctggagcttatggcagatacagaggatgaggcagctgtagaagaagcattccgggaatttatctgttaaaagaggagagataaaatgtttataaaaggtgtaaatcttggaaactggctggttctggaaaaatggatgagtcctgttttatttgagggtacggatgcggaagatgaatactggcttccccgtaagctttcacgggaggtttatgaggcaaggattaaaatccatcgttcagaatatattacggaaagagattttgtgaccattaaggcaatgggaatggaggctgtccgtatcccggttccgtattttgtatttggggacagagaaccctttacaggctgcataaaggaactggataaggcttttaactgggcggaaaagtatgggcttaccattcttcttgaccttcatactgcgcctctgggacagaatggctttgataacggaggtatctgcggtgtgtgcagatggtcgaaaagtccagaggaagtggaatttgtgctttctgttctggaacgtctggcagaaagatacggaaacagaaaagggctctggggaatcgaggccattaatgagccggttatggatcgcgcctggaaattatttgatgtgccaaaccgttatccggcggcagataaagacatggcagaaggctccggcccctgtacactggaatttctgaaggatttttatgtgagagcctatgacagaatgaggaaattccttccggaagaaaaatacatagtgatccatgacgggtttgagcttcttgcctggaaggattttatgcaggaagaaaaatatgtgaatgtggttcttgacacccaccagtatctgatgatggcagaggctgagggctgtgaacagaacgtggaggcatatcaggaatatatccgggagcattatgaaaaagaaattcaggagatggagcagtattttccagtgatctgcggagaatggtgcctgtttaattcttatgcctgcggctgcgatacaaaaggcggcagaagtgtacttaatggagaggaaggaagccggaaggaagctctgggagtacaggagaaaaagcagatttatcaggctgtggcagaggctcagttaaatgcctggaaaaaaggaagcggatatttttactggagctacaagcttcttacagatacggtaaacgaaaaaggctggatcggatgggacagctgggatctgggaagatgtgtggatttcggatggtttccgactgaggaaaaagataaccgggaataaaaaatacaggaatttacaggatttaatctatcagaaaccgcctgatggaatttataaaaacaggatcagaaaaaaaagaatccccttaaacagacagggcaatgagcccaggtctgtttaaggggatttttatctcctgcggattatggttccataaattttttcagctcttccataaaggtactgacatccttaaattctctgtatacggaggcaaaacgaacataagcaactgcgtccagcgcctgtaagtgttccatgacgatctcgccgatctgattgctggaaatttctctgtcagcccggtcaaagatttctccctctatagaatccatgatctcttctattttttctaccggaataggccgtttatagcaggcgcggagaatcccgtcctgaactttgctgcggctgtagggttcacggttctggtctttttttataacgcttaacggaatggtttctaccttttcgtaagtagtaaagcgctttccgcatgattcacacatacgtcttcttctgatggaattggtgtcttctacaggtctggaatctacaactctggtattgtcccgaccacaaaacggacatttcatggcattgtcccctttctatccagttgagcagagatatgcaaaaccttccaaaccctgctgttatgggcacattatactataattttactttttatgtcaacaaatggaaatgcataatctggcgtttttttacatatatttgagaaaaaacggttgctgttatgcgcttatgtgagctgaaacaaaaagaaatcattaatacctgcacctgccgatgcctgggatgtcccattgatgtggaatttgactgtaagaccggccagatcacagcgctggtggttcccggaccgggaaggctgtgcagcttttttggaagagaaagcgagtatgtgatcccctggaaatgtatctgccagattggggatgatatcattctggtccagatccaggaggaaaaatgttttcgcaaagaacacctgacataagctgtcaagggcttatattttttatatttttccgaaaaaagtatatttctccctgtctctgagaaagcttttaataagcaaaagagagaaggaggatgtttcgatggcgcttaataaagtagaaatctgtggagtaaatacctctgagcttcctgttttgaagcccgaggaaaaggaggaattgttccgcaggatcaaggagggagacaaagaagcaagagagcagtacatcaaaggaaatttaagacttgtattaagtgtgatcagacggtttcagaacagcaatgaaaatgcagacgatctgtttcagatcggatgtatcggactgatgaaagccattgataattttgatacaacactgcaggttaaattttctacctatgcagtgcctatgatcattggagaaatacgaagatatttaagagataataacagtatccgcgtcagccgttctctgcgggatattgcttataaggccatttatgccagagaaaattatacaaagcagcatctgagagagcctacgatcgcagaaatctctcaggaaacaggaatcgaaaaggaaatgatcgtttatgcaatggatgccatccaaaatccggtaagtctttttgaaccggtgtatacagagggcggagatactctttatgtgatggatcagatcagtgataaaaagaacagggaggaaaaatgggtggaaaacctttcgcttcgggaagcactggaaagactttcagacagagagcggcatattatagaaatgcgtttttatgacgggaaaacgcagatggaagtggcggaggaagtagggatttctcaggcccaggtcagccgtctggaaaaaaatgcgctgaaaagcatgaaaaactttttgggaacataaagagaataaaaactgccgcagagcagaagtgagcgtttatcagcactttgtctgcggcagtttttcgttaattttattaagaactgggaggattaaacgataccctgggctttcattgcatctacaactttttcaaatcctgcaatgttagcgcctacaacgaaattgtctttcatatcatagcgctgtgcggcatcgtcgatctttttgtagatatctttcataatgccgtggagcttttcgtctacttcttctgcactccaggaaagtctcatggagttctggctcatttcaagagctgaggtagccacgccgcctgcattggatgcttttcccggaaggaagagaacgccgttttccatagcatattccgtagcgtccagagtagtaggcatatttgcaccttctacaatgtatttgcagccgtttgcaataagagtcttaacagcatcgaggccaagctcattctgagttgcacagggaaggtatacgtcgcatttgatgttccagatgccaacgccttcggtaaaggatgctccttctacacggtcagcatattctctgatacgtccgcgttttacttctttaatatcttttacaatatcaagcttgataccttcagaatcatggatatatccgttagagtcgcacattgcaacaacctttgcgccaagctgtgtcgctttttcggcagcgtagatcgcaacgtttccggagcctgtgacgatcacggtttttccgctgagttcatcattgtgtgccttcatcagctcatcaagaatgtaaacaacgccgtaaccggtagcctgagtacgtacaagtgatccgccgtaggtaagaccttttcctgtaagaacgccttcgctgagatcgcggatacgtttgtactgtccgtacagatagccgatctcacgtccgcctacaccgatatcgcctgccggtacgtctgtgtcagcgccgatatacttgcagagttcagtcataaagctctggcagaacgccataacctctctgtcggatttgcctttgggatcaaagttggaaccgcccttgccgccgccgataggaagtcctgtgagagaatttttgaagatctgttcaaagccaaggaacttcagaatgctctggtttacagacggatggaagcgaagtcctcccttgtatggtccgatggcgctgttaaactgtacacgataacctttgtttacctgtacctttccgctgtcatctacccacggaacacggaaggaaatgattcgttccggctctaccagacgttcaagaatagaaagtctgcggtattcttcttcatttttgtcaatgactaccttcagggaatccagaacttcttttactgcctgatggaattccggttcacccgggttctgtgctacgactctttcgtatacctcttctgtgtaagacataataattcctcctcatccatttttatccgagttttttgctgtcagatatctgtcagcaatgatgctattatacactaaagtggtaaggttgaaaagagcagtgtgaaaattttctgtaaaaaattatggaagagaagagccggtttattgtgaaaatttttccagaagcattccggaagcttttcagaagcgggaatttatttttgtagaccggaatgaaaaaaaatggtatactgtcaattgaggatattgttggaacaacaacagtagaaaggaatgaggaggggccttgatcggacagaagtgaaatgtgaaaggagaaatcatgtatgacaggatttaacatgaaagtaacaccggagattgaacagctgacagaaatgtgtaaggatcacagcagcattgatctgtcactctacgggaaatacgatgtaaaaagaggactgcgtgatattaacggaaagggtgtccttgcagggcttacccaggtttccaatgttcaggcagtgaatgtagtggatggaaaagaagttccctgtgcaggaagtctgtattacagaggatataatatcaaagacctgacagcaggatttgtaaaggacgatcgttttggctttgaagaaactacatatctgcttttatttggtgtgctgcctgataaaaagcaactggaggaatttaagcagcttcttgcgaatcagcgttctcttccgagaaactttgtccgtgatgtagtaatgaaagcgccgggaagggatattatgaatgctctttccagaagtgtgctgaccctttactcctatgataataatccggatgatatttctcttccgaatgtacttcgccagtgcctgaatctgatcagcgtatttccgcttctgtctgtttacggatatcaggcctacaaccactatataagaggaaagagcctgtatattcataatcccaaaaaagaactgtctacagcagagaatatccttcgtattctgagacctgacaagaaatatacagatctggaagccaagatcctggatctggctctgattcttcatatggagcacggcggaggtaataactctacatttaccacacatgtagtttcttcttctggaacagatacctattctgccattgctgcggctctgggttcactgaagggaccaaagcacggcggtgccaatattaaggtgatccgtatgttccaggatatgaaaaaggaggttcatgactgggaagatgaggacgaggtacgcaattatctgagacgccttcttcacaaagaggcctttgacagacgggggctgatttatggtatgggtcatgccatctattctgtatccgaccccagagctgaagtccttaaaagctttgtggaaagtcttgcaaaagaaaaaggcaggatgaaggattacaatctgtattccatggtagaaaaaatggcaccggaggttattgcagaagagcgccgtatttacaagggcgtcagcgccaacgtggatttttacagtggatttgtgtacagtatgctggatcttcctctggagctttatacaccgatgtttgcggtggcacgtattgtgggctggagcgctcatcgtatggaggagctgatcaatacagacaagatcattcgtcccgcatacaaaaatgtgctggaagcagcggaatatgtgccgcttgatcagcgctgaaaaaagtagagcaggagataaaaatgtttcgatgttttttcccggatgaatatctggaatctgcttatgcagtgaactatgaaaaattatatcaggagggagtcagagggcttctgttcgatatcgacaatacgctggtgcctcacggggcaccggcagataaacgggcagtagagctctttgagcgccttcgaaaaatcggatttaaaagctgcttcttatcaaataaccagattcagagagtagcttcttttaatgaaaaaataggggagcgttttattgaaaacgcacataaaccggcagtacgcaattatcagaaagccatggaactgctgggaacagactgttccaacaccgtttttatcggggatcagctttttacagatatctatggagcaaaaagagcgggaatccgtaatattcttgtaaagccgatccatccgaaagaagagatccagatcgttttaaaacgatatctggaaagaatcgtactttatttttacaggaaagaggaggggactttatgaaccatgtggtgatcatcgggtttatgggttcaggtaagacgagagtaggcaagcagctttccagagatctgggactgccttttgtagatcttgaaaaattaattgtaaagaaaatgaatctttcagtaagagagatatttgagaaatttggagagccgtttttccgggcattggagacaatggcgctgaaggaactgatcaatgacagtgaaagaagagtgatttctctgggatccgggcttccgcttcaggaacagaatcagaaatatctgaaagagctgggtacagtggtatatctgaaaggatcactggaaacactgaaaaaaagactggaaggctccagcaaagatccgcttctggatggagaagaccgggatgataagatcaaaaagcttcttaagcagcgagatcctgtttatcagaagtttgcggacattcaggtggtgacaggagtgaagccatttgaggagctggttcatgaaattgaggaaaaattagcggcatacgaaaaaaacagttgaaaaaaccgctatggtattatagaatgatgggtagtgaacattacaataaggaggaaataaattatgatttcagcaggtgatttcaaaaacggtgtcacacttgaaattgaaggaaatgtatgtcagatcgttgaatttcagcatgtaaaacctggaaagggtgctgcttttgtcagaacaaaatataaaaacattattacaggggctgttctggagaaatccttccgtcctacagagaaattcccacaggctcgtattgaccgtgtggatatgagctatctgtacaacgatggcgacctttacaactttatgaatgtggaaacttacgatcagatcgcgcttacagcagatcaggttggagattctctgaagtttgtaaaagagaacgagatcgttaagatctgttctcataacggcaatgtatttgcaattgagccgcctctctttgttgagcttgaagtaattgagacagagcctggttttgcaggaaatactgctcagggagctacaaaaccggcaactgttgagacaggcgcacaggtacaggttccgctgtttgtaaatcagggagataaattaaaaattgatacaagaacaggagagtatctgtcccgcgtttaatttagataaaatctgaagaacgtatttaataagaggctgtatcagaagtgatctcagcagtattttcgaatttttctgcgagctttaggctttgggaaaaatgtgttgaaaatgtgctgcagagagaagctgataacagcctcattctggtataaggagagagaatatggaatacagaattttaggaaaaacagggctgaaaatttccagacttggatttggcggaatccccattcagagaattgacgctgagggaacaaagaaactgcttcacgaaatggtgaaaaaaggaatcaattatattgatacggcaagaggatatacagtcagcgaagaatatctgggatatgctatggaaggaatccgtgataaatttgtggtggcaaccaagtctatggcaaggacaaaagatgctatgagggcagatattgaaacaagccttggaaatcttcgtacagattatattgacctttatcaggtacataatcccagcatggaacagctggagcaggttatgggagaggacggagccctccaggctcttcaggaggcaaaggcagagggaaaaatcgggcatatcggtcttactgcccactccacagctgtttttgaaaaagctctggaacttgactgggtggagacaattatgttcccatataatatcgtagaaaatcagggagaggaactgattcgccgctgtacagaaaagaatattggatttattgatatgaaaccgctggcaggaggcgctattgaggacgcatcacttgctcttcgatatatctgtgcaaacagagatgtgacagtagtgattccgggaatggcagagatgacagaactggatcagaatataaaagcctgtgaggacgaaactcctctttcaggagaagagcttcagaaaatggaagaaataaaacaacagctgggaacagatttttgccgcagatgtaattactgtgccccctgcactgtgggaattaatattccaagtgtatttctgtttgccggatatcttcagagatataatctggcagactgggcaaaagaccgttacagtacattgccggtaaaggcatctgcatgtattgaatgcggagagtgtgagaagagatgtccttaccatcttccgatcagagaaaaactgaaaaaatgcgctgaggatatgggcgagtaaaatgtgaaaatgaaaaagctgcggatgtacaggagaaatttcctggaattatccacagctttttactatgtatggttttatttgactttttttcttccgggctcaaagaacataaagaacagagcgcttactagaagaatatacggataataaagatttggcataatgtcaaaggctgacatttcaaatccaagctctgcagcagtagaaagtgcgatcagcatctgagcaccataggggatcactccctggaatacacaggaaaatgtgtccaggatggaagcggttgtctgaggcgttacatcgtattcctctgccatttcctttgcaatgggattagccataacaatggcaacggtattgttggctgttgcaatatccatagcgcctacaagaagtcccatgcccagttttccgcccttttgagttttaaagatacggcggataaaattcagaagagcagtaaatccgtcatacttctggattagcgcacagatggcggatacaagaatagccaccattgtggtttcatacataccggcagccccggttcccatatttgccagaagatcagttgcctgagttgcgcctgttgccagaacaattacggaaccggaaacaattccaatgagaagaactacaaaaacgttgataccgataatccctcccaccagtacaagtacatacggaataattcggatcagattgtaatccttgataattgccgcactgtctgcaccgcctgaagtacggataaaaataattgccagggtaacaagagctgcaggaagcgcaatcttaaaattggcacggaatttatccttcattgcacatccctgtccattgcaggctgcgatggtggtatcggagataaaagaaagattgtctccaaacatagcgcctcccataacagcgcccacgcacagcggagctgcaaagccggaagctgtggatacagcaagggcaataggagtaataagcgtgatggttccgactgaggttcccatggcaagagaaacaaaacagcttaccacaaacagtacaattactgcaaagcgtgcaggaatcacagaaagaagaaaatacgctacgctctcagcgctttcccttcctacaactcccacaaaaatgcctgcaaccataaaaatcaggatcatggtaacaatattcttatcacctacaccctgtgccattacagaaagcttttcgtcaaagcttaatttggggttctggatacatgcaaccagaagagcagtcagaaatgaaaccacaatgggaatattataaaagcccatgggaattttcagaacgtactcgaaaagaattcccagtccaagatacataaccaggaatactgcaattggaagaagtgccttccagtttcctttcttcatattcattttcctccataaagtaacgtgctttccgcctgcagatatatgcggaaagtatacttcattgtaacattaaatatgctgtgatactacataaaaattatttttttatttactactaaaatgcaaacttaaattccactcttcgtatgggcatgccccctacacgccaataaaatttagtcttacacatacacaattttgctacataaattacttaatacaaaatctggcaaaacagaatccgtaatttgcgaacataaaaagattctaaacttgtgtatcctataaatccaaaacaacaagtattttgtacacttttttaacttgttcatttgcagatcagtacattctggcaaataaaaacgcttcgggaggatgcgatccgagactgaaaaatatgactgtccatagcagtctgcatcaggcgcgtaaagtggaggaagttgagaaatccaggaagttcgaagcggatgcgttcgttttattcccggaaaaataaaactggtaagaccaatttgggcgttattgacatgttctcttaagaaaaacagatggatatcagtcagttttcctattgtgtaaaaaaggatatgtgctataatgaaaaacactgattctaaagttacaacagtaacgttttaatgtatcaaatattgaagaatccacagagaaggagacaggatatgaagtatatgagacaattcggaatcattttgggtgtcacctgtgcaggagaactgatgaaatattttattccactgccgattccgggaagtatttatggccttttgcttatgtttgtactgcttcttacaaaagtaattaaggtagaaaatgtaaaggatgtaggagaatttctgattgagatcatgccattgatgtttattcctgcaggtgtggggctgatggcatcctggggagagcttcaggggtttctggtacctcttcttgtaatcacagtatccaccacttttattgttatttttgtgactggaaaagtaacggattttatgatggatcgaaaggaaaaaacaagcagaaagaaccggaaagtaagggaggagtgaaaaaagatggaaaatatagttcttaattcagcaacactgggatttgtgatcagtcttctggcatatgagatcgggcttgcaataaagaaaaaatggaagctggcaattttaaatcctcttctgatttccattcttctggttattggagtcctgatcctgtttggcgtagattacgacagctataatgccagcgcacaatatttaagttatcttctgacaccggcaaccgtctgccttgctattcccctgtatattcagctggatgttctgaaaaaaaatgtggttgccattatggtgggaattttatcaggagtggctgcaagtatgggaagtatcctggctatggccatggcatttgggctgagccataaagaatatgtaactcttcttccaaaatccattacaactgctattggaatgggagtttctgaagaactgggaggatatgtgacaatttcagttgccacgattattataacaggagttcttggcaatatttttgcagaatcagtatgtaagcttttccgtattcgccatgcagtttcccgggggctggcaatcggaaccgcagctcatgcagtaggaactgccaaagcaatggaaatgggagaagtagaaggggctatgagcagccttgcgattgttgtgtgcggactttgcacagtggttggagcttcggtgttcgccggtcttttgtgacatggatctactgaaaagtatagataaaaagaagcttcagatatgaaaagatattgttgcagttaagagtttgtaatcaaatccggcaaaataaaaaagccgtgaacctattgattttagtaggtttcacggcttttttagtggacctggcgggaattgaacccgcgtccgaaagcctatcccttgcggcatctcccatcacagtcgctgatttaacattcccttggcagtacgcccaccgacaggcttactgcttcagtagcttcataatacatctaccggggcaaagcttacccggcaaggtttctcacatagtcggcgccagattcctgatgtgtgagtgcgtcagggctgacgagcagcacttaggctgctaacgcgtactgttcgtttgcgtttatatttaggttcctggttggtacgcagtccaagagtctgcggatggcttccccaacttcaaagcccccgtcgaaaccagtacaagcccctgaaaataagatgacttctggcaaacagacgaacgtaagcttttctgtccttatattagaagaaattcagttatatgtcaagggtggtttttcgttttagtgcagattttttgttttgttttttccatttatcttctgacttgggaaatagctggttccgttttcattaatctggtcaaaatatctcccaaattgcttcgggtaatggcagcttcatggtatgccctgggggaaagcttttgttcaggcatggatatcccgatgtttcatttcccatacagatgcggcgctgaatataacagtaaacaggcatacagaaataaaaaacggcagcatttcaccggacatggtattttcggatttgttggcattcattccgagaagcatcaggcagtagggccagaagagatccgctccttcgctgttcagtacagtgccgagaacgcttcctaccagaccaatagcaataggtatggaaaaactccgtattttcatagagagaaaaagctgaagagcgcatatgggaagcgctcccacagtaccccggagaagccagaaaaaaatatcaggagggaataacccgggaagcccggctatttttccgcagaccagatataagattcctgtccagagctgtgtcagcagtgtgattgtcaggataactgtaagttttgcgaaataaatgcagcatacaggaactggggcagtcataatggaattccagttattgtttcgatgttccagacgccataagtaggagcagtaaagtccgatcagcggtgcaaaaaagaaactggcataaaataaagtatgctgtgtccagagagaataccattctgattttaaaattcccagattctggagataattaaaggttcccataattgccggaataatgggaatcagaatacaggccggcaggatcagtgaatgacgcagttttttgcgctcagcaagaatacagcgggtaagcataggttagacctccttttttacaacgatcatgcgacagataaaatagatgaaaacacctgccgccagaaaaagcaaaaaccgggacaacgggaaggaaagcacataataatcaataattcttgtatcaggatcccagttcataccgactacagaaaaatttgcgtaatagccccagagaaccagacgcgctacaggctttgggaaaaacagagaaaaaagccccaggaagctgccgccaattccaatccccagaggaagaagctgactgtgggacatcagtgacagagtctgctgtatggagagaaccacagtactgaccgcaaaggttgtaatcagatatatgaaaaatatagaaggacggatggtacctagatggtttacggttccaaagaagagaatcataagtccctgtccaataacaaaaacggttatatatcggagacagttcagatatttaaagtcaaaaaagctttcttgcttctgcatagtataaagaattttcagggtatctccttttacttccatatcacagacccgactggcaatcacagagatcattaagggcatcagaagcgtgttcatgacaggcagattgtagaacagcatcagatacccctgtgaaaattcagagggtttcatagaactaagctgccacatggtccaaaggatttcaaaacccagaaagcccagtggaacaagaagagcctttgtatggcggatcttctggcgctctgcccgtagttgtcttgctgttatagaaatcataagctcacctgctttcctgtaagatgaaggaaaatctcttcaaggctcatctgctgttcttccagtcttaaaattccaataccggaatttaccagaagagaaactgcctgcatgatccggttgtcttccagagtattcagcatgattctgccattctgccagtggcaggagataccggagtgcttcaggtattgaagggctgtctgatcatctgaggtgtgaagcagcatttttgaacggctatgttcatgaagaacagaaaggctgtcctgaaagatcagtgctccctggttgataattcctacatgagatgccatttggtctatttctgagagaagatggcttgaaataagaactgtaatgcccagggtctcgggcagggaacagatcagttctctcatttcctggattccggccggatccagaccgttggtaggctcatccagaaggagaagctttggttttcccagaagagctgcagccagtccaagacgctgcttcattccaagagaatactgactgacttttttgttttgctgttcttccatacgaacaatagaaagaactctggaaatgtctttttccggaacatttttcagtgtacatatgatctgcaggttttcttttcctgtaagatgaccgtaataagctggcgattcaatcagagatcctgtatctgagaggatgctcagacggtttctggagcagacttcttttccgagaatctggattttgccctctgtgggtctgataagccccagaagcatttttagagttgttgattttcccgcgccgtttggaccgagaaagccataaatgcttcctccgggaatacgcagatccaactggcttacaactgttttgtccttgtatttttttgtaagagaatttgtggtaatgacaggtcccatataaagttcctcctgtaaagtgaattgttattttctgaactgattacagtataaaatatcaggcttatgtgagacttaacagtaccttatttttagcttaattttatacaggagaagttggaatgggtacaaaaataaattataataggaaaagaaatgaagaggagacagaccggagggaaattttatggacatatatgaacgaaaactgatgcttgtagatgacaatcaggaacttctggagatgattgcagacattttaagacatagcggttataaaaatatagtaaaagcaaaatgcgtgcaggaagctctgacggtttttcagatggaaaagccggacatggcagttttggatgtgatgctgccggatggagacggatttcagctgtttcagaagctgagagaaaactcagagattcccattctttttctgtctgccagagatgaggacagagacagactttttgggctgggtctgggagctgacgattatattaccaaaccatttctgccgccggagctggtgcttagagttactgccatactaaaacgaacctatcgtatggaaaaagaaaaaactcaggaggaacatattctgcgtctgggcagccacgaagtgctgtttgactatgggattgtgcgttttcagggaaacgagacttctcttacggcaaaagaactggcattgcttttaaagctgcatgaaaacagaggcaggatcgttacctttgatgctttgtgtaatgcggcctggggagacggttattatgggtatgaaaatacgctgatggtgcatatccggcatctgagagaaaaaattgaggaggatccctctcatccgcagtggcttcttactgtacggggactgggctaccggctggcagaaggaaagggagaaaagccatgaagagcctgtttaagattatcagccggtattctgtcacagccggtatgattattggtgttatattgatcagcaatattgctgtttttgtggcggtgggctaccataacatggtttctgcaggagccccggattttaagagaagcgctctggaaagtgttggaaaggaattttatcaggaaaatgatacctggcagctgtctgacacagggagacaggagctgaaagaggcagattttaagtggtgtatggcacttgatgaacatggggaggttgtatgggaatggaagcttcctgcaggctttgaccgctcctatacaatttcagaagtggcacggttttcaagatggtatcttcatgattatccggtagcggtctgggaagccgggaaattacttctggtagtgggacttgatccggaattttttttcagatacagtgagattcttactcttacaaattttactatgattccgcagtatgtgaaatgggctctgattgtgaatacgatcgtgattattgtttttgtatttttgctgggatatcggttttatcaggcgctgaagcctctgggcaggggccttgagaaattatccagggaagaggaggtaaagctcagggaaaaaggtatgacaggtattctggcagcgcagcttaaccggacttctgaaatacttcaggaacagaaaaaacggctgaccaaaagagatctggcaagaacggagtggattgcaggtgtttctcatgatattcgtacgcctctggcgttaattgtaggttatacggaccgcctttccaaaagtcccaatcttaatcaggaggagaaggctttggctgatgcggtgtgcagacagagcttagtgatccggcagctgatcacggatctgaatcttacatcaaagctggcatatgaggcacagccattgaataaaaaagagtgttctcctgctcttattctccgggagtgtgcggcagacatttataatgaaaaaattgaacaggataaaggacaggaaccggaggtggatgtggagcttttgattcctgcagacatggagaaggtccgtatttttgcagacagcggtctgctcaaacgtgcgttgaggaatctgatcggaaacagtgtaaggcataatccgggagggtgccaggttatggtaaggctgtacgaaaaaaatgaaaaaatatacatttctgtaaaagatacgggaaaaggagtcccggaacttgtggtgcagaacatggacaaccagacagataaagtccatattatgggattaaggcttgccagacagattgtaagggctcacggaggagaactgatttttgagaaaagggagtcgggcacttatgatgtgaccctggaactgtccgtatcgaaactgcatccgtagggagaatgcctctttttgttttaggctcgcttcagtacctggaagagtctattttccgattgtatttcgtgaagatagcgtctataataggtatgactaaaatgaaaggataagaggtaattatgtacacgcttaaaaaatttatccgttactacggaccttataaaaccgtgttttttctggatcttctgtgcgccgccattatcagtctggtggatttggcatttccgcagattctgagaacactgacagcaactgtttttacagaagagccttccactatcctgaaggcccttcttcccattggcctgtgccttctgatcatgtatgtcattcagagtttttgtgtgtattatgtgggctatcagggccatatgatgggagcaaagatggagagggatatgagacagcagctgtttgaccattatgaaaaactgtccttttcctactatgatcagaacaattccggacagatgatgagcaagctggtatccgacctttttgatattgcggagtttgcccatcatggtcctgagaacttgtttatctctctgatcaagattgtgggatcatttgttttcctgtttcttattaactggagactggcaattccgcttctgatcctggtattgatcatgctggtgttttccatgaagcagaaccggagaatgcaggaaacctttatggataaccgcagaaagatcggtgatgtaaactccagccttcaggatactctggcagggatccgtgtggtacagtcctttgccaatgaagaagtggagcgcagaaaattcggaaaaagcaatcaggcttttcttcactccaaggatgcaaactacagctgcatggggaatttcatgggctggaaccgtttctttcagggaatgatgtacctggtgacactggtgttcggcggacttcttattgccagaggaaaaatgaatgccggagatctggccatgtatgctttgtatatcggtatttttgtaagtcctatccagattcttgtggagctgatcgaaatgatgcagaaaggcttttccggcttccggcgttttctggatgtaatggagacagagccggatattgtagatgctccggatgcagagcctcttacggatgtgaaaggagaggtttcctacgaaaacgtgtccttccattacagtgatgatgagactctggttcttgataatatttcttttaccattcctgcaggacgctctattgcactggtaggtccttccggaagcggcaagactaccatctgttccctgcttccaagattctatgatgtaaccggaggccggatcactattgacggcaaagaggtaggaaagctgactctggaatctctgagaagccagattggtcttgtgcagcaggatatttatcttttcggaggaaccattaaagaaaatattgcttacggcaagccctctgcttccatggaagagattattgaggctgcaaaaaaagcaaatatccatgactttattatgtcccttcctgagggatatgacacctttgtaggagagagaggaacaaggctttcaggaggacagaagcagaggatttccattgccagagtatttctgaaaaatccgcctgttctgattctggacgaagccacaagcgctcttgataatgaaagcgagcgctggatccagaaaagtctggaggagctttccaggaaccggacaaccattaccattgcccatcgcctttccaccatacggaatgcagatgagattttggtggttgcagataatggaattgcagagcgcggttctcatgaggagcttctggcaaaaaacggaatctacgcgcattattatcagatgtcctgataaaattataaatcccggagaggaatttctggagtctgccagtaaatccttctccgggatatttttatgagaacttatttgtcaaaactgacggttttgtgatatcttgcattggcatccagcagggctttccattctgcattgtccagctcttcattgtaatactgaactttcagttcatccatgtactgcatataatccagaagatagatatctatgaatgagatatttttgtcctgtatcgcgtaattataagagtcagaggaagagcggttgtacggcagcatattgccgtcagcatccagagcaaccaggaaacagtcgctgtcagaaccttctttatacaaaggagtaatggtgatttcataaggcgttctggcaatggaggcaagtccgatgccttcttcattggtttcattgatttccagagtttccgtcagggaattatctactgttaccgggatttcaaagctccagtcccctttaaaccagtaattctgatatttattgggattctgagaatattcttccggcatctggttcataatttcctgaaattctgcctctgacatggcttccagttcctcctgggtatatccactgtcccagaattcaggttctgctttgtatccgataaattccttaaaggtcaggttcagagtataagtttccggagtaacaatgggcttgacatactgagactggagagcgccgccccgtgctaaaacacggccgttaaattcttccaggttagcatggccttcttctgtttcatcattgatatcatccatggtaatccccatttctgcaagaatctcatccaccatttcctgatatttctgttcaaattcagcggtatcttcaaactgagtatccagccgtaaaatagctatgtaggtatggtcatccgtaaattctccttccggattgatatactgcataccaggattcatacccgtatcttccaggaagctgtatcggggttctgttacaagagagatgcatggttttccgtcctgatccatcagagtatccgggaacggttcttcgctgactgcttttaccgtaatatagcaggtcagatcgtttgcataaatttcagacagggttatggtgagtccgtcctgtgtttttgtgaaaactgtttcccggggagtttcatcagcggaagatgtctccggaagtttctctgtatctgaggttggagcggcagactcttcaagagaggttgccttatccgagaaattcccgaaaaagcttactttatcctgaagctgttcaaaaattcctccgatgagcggaagctctcttgccataaccgggttggctgcgcagaaaataaatccaactgccacagcggctgccagacctccggcaacctttgcccctgttttcatccagtggtagggattacgggtcttttttttctgtttgaccgtatgttcctcgatcatgcggtaggctgtattaattctttcatggacaactgccggcagggcgatatccctgttcagatcgtcttttaattttttttcattatcgttgaatgtaatcatcatgcatgtccctccctggtctgatactggcaggcttctgagagcagtttccgtcctcgctgaagccgggtttttactgtactttctttcatattcagaatctggctgatatcgctggtgttaaaaccttccatataatacagaaggagaatgatcctgtatttttcatctaaaggagccagaatctgattccactcggtggtttcaaaatcgtcttcgtaaaaaggagtgtccggaatactgtctgtatacactgtcagtttctttttgtgaagaatatccttgcatttgttgatcaggatccgtgtaagccatgtctgaaaatatttgttgtttttcagactcagaagattttcataacaggataagatggtatcctgtatggcatctgcggcatcctcatcgtttttcagataggaacgggcaattttgtacatgctctgtgtctgcgtatccatcagacggcagaaggcatcggaatcacccttttttgcttttcgcagtaagtgttcaatcatagatttcctcccctggttttctgaccggtcgtggctgggatgttaaagtagaagcttctttgtttttgtgtatctgcttattagacggcggaaaaacaaaaaaggattcaaaaagtacaaaatttttaaaaaatctgtttgggcgttcacagaagaaacataaacttctgatatcataaatagaaaaataaaaacagatttgtccaggctgaatggaaagacacttctttcgcacaggacaagaaaaacggtaaaataaaaattgttttgcctgtaaaaatctcttataatcattataaatcaaaacgggaggtattcatatggaagccctgaaaatacttgtagtagatgacgaaagccgtatgcggaagctggtaaaggacttcctgaccaaaaaaggctttcaggttctggaagcaggagacggtgaggaagccatggatcttttttataaagaaaaggacattgctctgatccttcttgatgtaatgatgccaagaatggacggttgggaggtctgccgtgaaatccgcaaaaattccaaagttcctattattatgcttacagcaagaagtgacgagagagacgagcttctgggatttgaacttggcgtggatgaatatatttccaaacctttcagtccaaagatccttgtggcaagagtagaggctattttgagaagaacaggacaggatactgcagacaatattctttcagcagggggaatcgttatagataaagcagctcaccaggcaactgtggacggagaacctatggaactgagctttaaagaatttgagcttctcacatattttctggaaaatgaggggattgctctgtccagggaaaaaattctcaattctgtatggaattatgactattttggggatgcccgtaccattgatactcatgtaaagaagctgagaagcaaaatgggagaaaagggcgagtatattaagacagtatggggaatgggctataaatttgaggttgacgaagcatgagccggaaactgcttccagaaaagaaaagcctgcagataaaaaagtcggaaaaaactcataagaagaaggtttgttccctgagacatcagctggaatttttctttatcggtttgctggtggtatctatgtgtaccatcaccgctattaattttttgtttctggaacggtactatatcacaaaaaaaacagaggttctggaggccgcagtcaatgatcttcaaaaactgaagattgtaacagatgcagaaggaaacagcacagcagagatttctgacagcctgaaaagagaatgttcagaaaataatcttacctggactattattacagtagatggaaaagaggttgcatctgagggcggcaatgaaaaaatgctgcaggcccgcctcattggttatgcctatgatctggatgagcagaaaggctggacgaaaattctggattcaacagatacttatgtgatccagcaggtcagcgacaggtttgtggaaatggattatgtagaaagctggggcgtgctggataacgggtgcttctttctgatccggacgccgctggaaagcattcgcgacagtgtttctatttccaacagcttttacttttttgtgggaatcctgatcattacagtcagcgcagttattttatgggcagtgacaaaaaggatcaccaatcccatcagcgaactgacggttctttccagcagaatgaaaaatcttgattttgatgcaaaatataaatgcagggcaggaaatgagattgacgagcttggagagaattttaacaaaatgtcagaagagctggaaaagacaatttccgagctgaaatctgtaaataatcagcttcagaaggatattgagaataagattcgtatcgatcagcagaggcaggagtttctgaataatgtgtctcatgaactgaaaacgcctatcgctcttgtgcagggatatgcagaggggctgaaggaaaatatttcagacgatccggaaagcagagagttttactgtgatgtgatcatggatgaggcggccaagatgaataagcttgtgaaaaatcttctgacgctgaatcatctggaagaaggccgggacgaagtaaaaatggaacgctttgacattgtaagcctgataaaaggcattcttcagtccatggacattatgatccagcagaaggaggcaaaggtcagctttgaggcagaggagccggtgtatgtatgggcagatgaatttcggattgaagaggttgttaccaattataccagcaatgcgctgaatcatctggacggagacagagaaattgaaatctgtgtgtgtccggaaggagacagagtaaaaattactgtgtttaatacgggaatccccataccggaagcagatatcccgaatctctggaaaaagttttataaagtggataaagcaagaaccagagaatacggaggaagcggaatcggactttctattgtcaaggcaatcatggaaagtcataatcaggagtacggtgtccgcaattatgacaatggtgtggaattctggttcacccttgacagggcaaattgagataaaagattgagacaaaaatcgacagatgtgaagaaagctctttgcatctgtctttttttagggtatacttgacgtagccgttgaagagatgaatacagaacggattcattttgccggatatatcagaaacggaaacacataaaaaagatcaggttcatgggaaagaagagatttccggaaccggaaaataaaaacagaagcggataaggattacaggacagacggtgtgcagcagatgcgtttcgggattgaaaaacagaaagaaaatccggaaatgaataaaagagtgcagggcactgtaagagatctgtttttcggatctgcaaataaaagaacataaatgtataaaatgtgagtttttgtaaatttttaacaaagaggaaagatatatgatcggtattatagactatgatgcaggaaatatcagaagtgtagaaaaagctctctcctatctgggagagaaaacagttgtttcccgggatccggacatactgaaaagtgtggacaaagtaattcttccaggagtgggaagctttgggcaggcaatggaaaaccttcacagatatgagttggttccggtgattcgggacatgatagaggatggaaaaccatttcttggaatctgcctgggactgcagcttctttttgagagcagtgaggaaagtccgggagcagaggggcttggaatcctgaaaggaaaaattctgaaaataccttcgtctccgggcttgaagatccctcatatgggatggaattccctgcagcttcagaacaatggaagactgtttcggaatattcctcaggatacgtatgtatattttgtacattcttactatcttcaggcacaggagccggaaattgtaaaggcagtaaccggatacggtacggagatccatgcttctgtagaaaaagacaatgtatttgcctgtcagtttcatccggaaaaaagcggaaaatacggacttgaaattctgaagaattttgcagagcttggcagagaggagagatgatatgtttacaaaaagaatcattccctgcctggatgtgaaccggggacgggtggtaaaaggtgtaaattttgttgacctgaaggatgccggagatcctgtggaaattgccagagcttatgatgcggcaggagcagatgagctggtgtttcttgatattacagcttcctgcgaaaacagagatacggtaacagatatggtacgggcagttgcttccagtgtgtttattccctttaccgtaggcggcggaatccgcaccgtagatgattttaagaagcttctcagagaaggcgcggacaagatttctgtaaattctgcggcaattgacagaccacagttgatcacagaggctgcggaaaagttcggaagtcagtgcgtggtagttgctattgatgccagacgaagagatgacggaggctggaatatttacaagcatggcggaagactggatacaggaatagacgctgtctggtgggcaaaaaaggtggaagcgcttggcgcaggagagatacttttaaccagcatggactgtgacggtacaaaagccggatatgatctggaactgactcagacagtggcggatgcagtgaatattcccgtaatcgcctcagggggagccggcactctggaacatttttatgaggcgtttacaaaaggaaaagcagatgcagttcttgctgcgtcattatttcattacaaagaactggaaatcggtcaggtgaaagactacctggcagaaaaaggaatttcagtaagaagataaagaggtgacagttatggctcctttgtcaggagagtggctggaagcgctgaaaggcgaatttcaccagtcatattatgcaaaattatacaaaacagtaatgcaggaatataataccagaaagatttttcctcctgcagaagatatgtttaatgcatttcattttacaccgctcagtgaggtgaaagtggtgattttgggacaggatccttatcataacgacggacaggcccacggtctgtgtttttccgtaaaaaaagatgtggagatccctccgtctcttgtaaatatttatcaggagctccatgatgatcttggctgttatattccggataacggatatctggaaaaatgggcgcgccagggtgtgcttctgttgaatacagtgcttacagtgcgggcgcatcaggccaattcacacagaggaattggctgggaacagtttacagatgcagccatccgtattctcaacgaacaggaccgacccattgtatttcttctctggggacgtccggcccagatgaaaaaatccatgctgaacaatccaaaacatctgatcctggaagctccgcatcccagtccgctgtctgcttacagaggatttttcggctgcagacatttcagcagaacaaatgaatttttaagagaaaatggtctggaaccagttgactggcagatcgaaaataaagatcaggtgtgaaggagacatcatgggaaaaaagaataatcttgtaagaaatgcctcctttttgatgatcgcggcaatgatatccaagatcatcggcctgttgtataaaagtcccttatcctccattgtagggaatatgggaatgggctatatcagccttgcccagaatgcctatatgatccttttgatgatcgcatctttcagtattcctcaggcagtatcgaagctgatctcagaaaggattgcgttaagagattacaaaaacgcacagaaaatattcagagggtctatgatctatgcggctgttgtaggcggagcagtagctctcttctgcctttttggcgccagatttattattccccgcaatcagcccaatgcagttctggctttgcagattttatcccctaccatattcctttcgggaattctcggcgtgtacaggggatattttcaggcatacagaaatatgcttcccacatctgtttctcagattcttgaacagatttttaatgctattgtaagtcttcttgcagcatggctttttatcaaaaatatttcagatggaacgccggaacaggtggcaaaatggggagctgccggctcaacagttggaacaacagccggagtcgtgacagcgcttttgtttatgatgatggtctacggaatgaaccggaaaggcatccgcgccagagtaaaaagtgaccggagacacagagaaaaatcatatggggatatcctgaaactgatcatgctgatcgtatctccgatcattctcagcgcatttatctataatgtaaatgggtatctgaacggtgttctttattcggaaattctcggaacacagggagcagatgcagacaaattaagtatgatgtatgcagagtatgcaacttactttatgagtattatcaatattcctctgaccctttccagtgcagcgcccacctctatgattcctgaggtttcggctctttatgctacaggcgcagtaaaagaaaccagaagaaaaattgatcagacagtgcagctttccatgtttatttctgttccctgtgcagtaggcttagccgttcttgcacagccaatcgtatccctgctgtttggaggaaccaatggtacagcaggaaagcttctgatgctgggctcctttactattctgttaaatggaatgtcaaatatttcaaacggagtgcttcagggaattggaagaccaaagattccaatgattaccgctgcagtagcgctggtggtcgatgtggtagctgttgttctgcttttactctttacagatctgggaatttattctctgctggttgcaatgattatttatgcggttgttgtatgtattctgaacgacagggctatgaaaaaataccttcgatataaaaatccgtggagatttgcatacctgaatccaatccttgcatctatacctatgggagctgtggcagggcttgtatattatggtctgtacaaactgattcagtcaaatgtgatctgtctgtgtctgtccattgcactgggaggtgcaacctattttatagtatatattttaatggaaaagccttctcgggagaggttgagaagaatgccgggaggcgctgttctggtaaaaatatttggaagaatgttctgagtaaatgaaatgaaaaggtaatcagataaagaaaaagtccctcagtatcgggggactttttccagttccagaagctttatttttcgttccagtcctccggcatatccggtaagacttcccttacttccaagtactctgtggcatggtacaataacagatactgggttatgcgccaccgcgtttcctacggcctgcgcagacatgtgctccagacctcttttttgtgcaagaacagcagcgatttttccataagtgaccgtggttccataaggaatatcacaaaggatttcccatacttctttttgaaattctgttcccctcagatgcagaggaacagaaaaatcaggtttctgtccggaaaaataaagatccaaccagatctttgcctgccctaataccggacaggttttttcctcgtgactttcatctaggtgaagcgcaaaatatttctgcccataaaaccataatcctgtcagtcctatgttatccgctgccagaagaatttctccaagaggggattgataacggctggtgtagtgcataataccacctccatgtaagtgtgattgtatgggcgtattataattccttcagcggggaaaaacaagggggaggaagagaactgtatagtgggtaaaattaaaaagtattttttccttttctgtaggtatggatgatttcggaaaataaatccacagggttttcttcgagcgcagtagaaagcagtattaatttttcaatactgatccagtttttcccagattcaatatttgccagatgacgtggagaaagccagtcgctgttatcaaataattcagaatttctgagttcaataaaatgttctcatgttttatattcagcgcccagtgcttttcgtttttctttgagcatttctccgacttttactaatccaggatcatatttctttcgttcagacataaaaacctcaattatgcactatggtgcatttactatatatactaaactcaaagcaacagttcttggaaaaatcagaagagaggattttataggaacaaaagattgacgtttaaggtaaatgcagtgccgacattaacatccccttacaggcgagatgaaaaagaatcgggaatgtatgaaacgatttattatcttcttgtcaatatgagagatctgccggagaacattccaatggatgtgaatccccgtgttcctaagatgggaaccaatgtggcaaagagactgattcatgcagttgtggagccggaaacagatttttatgttaacaacaggggaattgtaatttctgctcaggcctttagttttaacagtacagactcagaggtaactattgatctgggagaacagaacgatgaaaatgacagattcagttatggaattctggatggcggacatacctatacagcaattatgcagaaccgggataaaattccggaaaacatcgaaaaatatgtacgtattgaagtaattatcaatgtgcttaacattacacggctttccgatgccagaaacacatccgtacaggtttcagatattgccctatttaatttggaagacagttttgaggatattcacagggtcattaaagatgaaacttatgcagaaaaaattgcatataaggacaatgaaaacaagccgattaatgtttcggagcttttgagacttctgtatgcatttgatataaaaaaatatccggatgacagtatggcgcctattcagagctatttcggaaaagcctaggtatttaagcgatataaagaggcctacaataccggcttttataaagctctgacaaaagaacttcctgttctggtaaaactgtatgactatattgaacaggatcttgccaataaatataatgagtataaaaagtcgctgggtttttctcatccacattttgggaatgtaaaaggtatagaatatatggaacggggaggaaaaacaggatttttacagaaagaaaccatgtatatgatttccagcggatatatttatcctatatttgtagttttcaggccattgctggaatattttaaggaaacagaaacagtaaactggctgtttgacccgttggaagtatgggatgaggttggggcaagccttgtacagaatacatttgagacaagcaacaatccccagctgacaggtaaagataaacagctgtggctttccaattatcgtattgtagaaactcaaagtttgaggaaacttttgaaaagaagatagagaagaatgtctgttggaaggatatgcggaaatatattttgtgaattctgggagttttatagattgtagagcgaataaaacaagaagaaaagtgtgtatggtaaaaatagtgtttgtatgccacggcactctttgaaagcttctccaaaaagccagtaaaatcaaggcctggaaggcattggcggttgaaaaataacccgataataacccacggtattttgtgcagatattacatgtaaatatagatgatttttgggacgcaacatgatagaagagctgtaagattttgaaaagaaaatcttatggcttttttctgtgaaacaaatcgaattgaaaagacaatgttgataggttataatttttatatctctgtagacggaatatattagatggaggatgtaaatgtttgaccaagaaaaattagtagcagttattgctgcttataaagattattttccaaatcattggaaagatgaaaagtataagtgggaggcaatccagtatttccaagaacattggaacatatctgccgagaatttccttgatatgtttatggaagcaacagataaaacctataatttgctggctaatatgaataattatccccggggtatgattaaatcatttgctatggctgacccagaagctgttcgatctatgtttatggctctttttgatgaatctcaaaatctggcacagcgtattgaacaatttataacatcagcagaaaatttacgtgtcaaatatgatgatggtacgtggaaacagcattatcagacagcaaatgcgatcagtacatatctttggcttaaatatccggataaatattacatctataagtattctgaagtgcgtgcaattgcgagggagataggaagcgattttgtacctaaaaaaggtggatcggtatcaaatatagaaaatagttataaactttacgatgagattagaaaaaaacttgctagtgacagtgagcttgatgaaattttacaaaatgttttgaatgaagattgttatccagatccaagaaaaataacgatgacgttagatgtaggattttttgttagtagattctataatcagcaaaaagaaattgacctaaattccttgcattcagatgcaaaattctcaaaatggtatgcacctgttatcgaatctttgtataaaatgggtggaagtggaaaaagaccagatgttcaccagaaaattattaaagattatggtattacagacgatgaacttaaagtggtaaattctaccggtaatgcccaggtactaaatgatatagattgggctcgcaattatttggtttatgaaggtgttcttgataaaggtgagaacggtttgtggacacttacggagttggggaaaaaactcataataacagaggaattggcaagtaaacttaccgctaaatgggttaagataaagacagcagaaagagaacatagatacgtaccagacatagatttgacgccgtattatgtgtatagaacagacggtaatcagaattctattgccttatataaaaaagaagattttcttaatgaagtgtatatggcagaagaaaactataatactttagtagaccttcttaaaaacaaaaagaatttaatccttcaaggagcaccaggggtgggaaaaactttcgctgctacgagattggcatattctatgatgggcgaaaaggatgattccagaattgagtttgttcagttccaccagaattattcatacgaggatttcattatggggtataagccacaagatgaaggatttaaacttacaaatggcattttctatcagttttgtatgaatgcagccgagcatccggataaggactacttttttattattgatgaaatcaaccgtggaaatatgagtaagatttttggcgagttattgatgcttattgaaaaggattacagaggtacaacggttacactggcatattcaagaacagctttttctgtaccaaagaatctttatattattggcatgatgaatactgccgacagaagtctggcgatgattgattatgcgcttagaagaagattcagcttttatgagatggagcctggatttaattcagaaggatttaaagcatatcaagcatcactgaaaaatgaaactttcaatactcttatagaacagattattgatttgaatagggaaatcaatatagatgattctcttggaccggggttccgtattggtcacagttatttttgtggtcaggaagaatgtactgaggaatggatgaaggcagttgtgtattacgatattattccgatgttgcaagaatattggtttgatgatagacaaaaggttaagcggtgggaaaatctattaataggagtattcaatgactaacgataaaggtatttttatcaaaaatatttattatatgcttgcctatgcatttcaagtccttagacagaagaattatgataatgttgcagctgaagattttgacaatgtacaggatttatttgcagcaattcttgcaaaaggtgtttcgcaacagcttaaacagggactttatcgagagtacattacgaaaaatgaagacttgtccattttgcgtggcaaactggatatttatggaactattaaaaaccaaattcaaaggaagatgtttttgtcttgcgagtatgatgaactctcagtaaacaatatctttaatcagatattgaagactacaataactattctgatcaaggatactggagtaaaaaaattgcataaggcggagttaaagaagatagttctgttctttaatgaggtagatgaaataggactttcaaatattagatgggacagtctgatatatcaacgcaacaatcagaattatgagatgcttatgaatgtttgttattttgtattagatggaatgattcagactacaaacaaaggtaattataagatgatgtctttttctgatgagcatattcatagactttatgagaaatttgtattggaatacttcaagcaacatcattcctatttgtcagaagcaagggctgctcaggttaagtgggatttgccttcggatacagaagagagtatgatacgatttccgcctgttatgcagacagatattttcctcagatataaagagcaaattttaataatagatacaaaatattatgggcatactatgcagatgcagtatgacaaggcaacgcttcattcgggaaatatgtatcagatttttacatatgttaagaatcaagatgtgaagaatacaggtaatgtatctgggatgttgttatatgcaaaaacagaggaagcaatcacaccagattgcagttttgtgatgggcggaaataagattagtgtaaaaacattggatttgaataaagagtttaaattaattgcagctcagttagataagattgttgaagagtattttcgaaagatatagttagacttatagaatggaaagtgttgggaatatttataatttagaaagttggtggaaagcttggatataaaacaattaatcggtgaagcaactgaatatgacaaaaagctatctttggaagcgaagaaaccaaagagttggtgtaaaagcgtaagtgcttttgcaaatacacttggtggagcgttaatctttggaatagccgataatgatgaagttgtaggacttgaaaatccgaatggtgatgctgagaaaataagtgaaatcattaagacaaggatggatccaattccagaatttcgtcttcgatttgaacaggtcgaagatggaaaagtattaattatactggatattttcaaaggtgaagagacaccgtactattattcgggtgatggtgtgctggaagcatatgttcgtgttggaaacgagagtgtgaaagcgacatcaacggaattgaaaagactggtgttgcgcggtagaaatacatcttatgattcacagatttctacgtataaggtggaagattttgctttttccaaactccgggaaagatataaaaaatggacaggaaatagttttgatgagaaagatcttatatcatttgggttggcgaatgagcaaggatatttgacaaatgtcggagccttggttgcagatgaaagccctattcgatggtcaagattattttgtacccggtggaatggattaaataaaagcggtggtacaatagatgcatttgacgatgcggaatattctggaagtgtattgtcattaattgataatggagaagcttttattaagagaaatgcgaaattaatgtggagaaagactgctaattccagagaagaaatgccggaatatgtagaacgtagttatcatgaagcattggttaatgcattggctcatagagattatcttgtgaatggtagtgaagtgcatattgatatttacgatgatcgtatggaaatttattcgccaggaggcatgccggacggttccattattcaggacagagatccacttacagttccatcaacgagaagaaacccggttttggcagatatatttaatcggctgggatatatggaacgtaaaggtagtggattcggaaaaatcatcggtggctatgaatttcagatcaactatgatgaaagtaaaaagccgtcttttagatcggatcggtaccagtttacagttgtgatgccaaatttgaattacaatgtccctcaggatgtccctcaggatgtccctcaggatgtccctcggaatgtccctcagaaaaaagagagtaatccgttggaaattcaaatattgaatatgataaaaaaggataataaaatcagtacagaaaaaatggcaatgacgttaggaataagttccaagactgtaaaacgtcacatcaaagatataggtattatacgatttattggtcgtggttccaatggacattgggaaataattgatgattagaaatacaacttaatatcatgtatagcaaagctataagatttcaaaaatggagtcttatagctatttttttgcgcaaaaataaaaaaatattcgccaacaccctgtaaaaacaccgtttttcttttgtatatgtgagagataaaaacaaaaaaataaaattttttgcatttgcccactgtattttaccctctgagcgtttcgttatatgagggcgtaaaaaagaaagtctgatgcaatggtaataaattgtttttgtgctctcaattgaatccaggcctgattcatatggaacaagtagatcagaacaaaaaaaggaggaagatgagatgaacaaagtgattttaatgggacggcttacaaaagctccggagattaaatatttgcaggatgataataaaaccgcaatggcgcgatatatgttagcggttgatcggagatatggaaaagaccgggaaagggaagctgattttattccctgcgtgacattcggaaagaatgcagagtttgcggaaatctatttgaaaaaaggaaccaagattgtcatcagcggacgaatccgcacaggaagttatacggacagcgaaggagtgaaaagatacagcagcaatgttgttgtggaagaacatttttttgctgaaaacaagaaagcatccgatacggattccaaagatgagaaagatggatttatgagtgtgccggaagatgaggagctgccgtttgagtagaaagatctctggagcttaagcggaagagcgcacttatatactttagcaagtatgtgcgtcctccggaagggtacttctttctggaagctattccaaaagaagttttcggattgcatccggtgaaggagtatcccttccggcatagatgcctaacccataaaaagaaaacacgaaaacagaaataaaaggaggaagttgattatgcaaaaaaagaaaattttcaggaatatgtaacacgtacacaaaatgaaatcgcagggattgaatcgaaaatcgaagcggaagaattgaaaaaactgcaattagaacacaagatgcagtgattgcagaatgttacagaatataaggtgaataaatcgaaaaaagcgagagtgagtcgcctgattacaaggggagctgcgattgaatgtatttgcaaagatgtggaattgcttgataaagcagagttctttcttctggcagaaaggattttctcggatccggttctttgtgatgagattgcaaaaatggttgttggaagaagagatcgtatagaagcaggagaagcagaacttcaaagcaccattgaagacttaaaagaagctggatattggaagtccagcagaaaggagtaggagatggcaagctatcattttcatttaacacaggtgaagagaagcagaggacagtccgtgattgctcaggcggcatatcgcgcaggagaaaagctttacagtacctactatggagaatccagtgattttacaagaaaacgtggcgtggtcatggcagaaatttgtctgccggaccatgcacccagagaatatgctgacagggaaactttgtggaatgcgttggaatgggcggagtccggaagaaaagcacagctggctcacagctttgatattacgctcatgaacgagttttccatggaagaaaacattgaaatggcacgggcatttgtccaggaagaactggtgtccagaggcatgattgccgattttgcaattcatgatccagtgcggccgaaaggtgcagaacctaatccacatatccacatcttagttccgatccgtcctctgaaggaagatggaacctgggggataaaagaaaagaagatatcggtgatggatgagcaggggaatccggttttggataaaaatggaaaacaggcataccgtgcagtatccacaaccggatggagcagcaaggagatgctgatctatctgcgaaaaaactgggaaaatcggtgcaatgaaaagtttaaagaaaaaggattatctgttcgagtcgatgcacgttctttcaaagaacgggggattgaccgaatcccgatgattcatgaaggaccacatgtacgcgcaatggaagcaaaaggaattcggactgcattaggaaatctgaaccggctgatcagtcagtttaatcagatagctatggaaatcacagtgctgaaatcttggatatcagaaaaaatatatgaactgaaaaggcagatgtattatgtgcagaagccaacacttgcagggtatttacagcgatattatgacgagagaaaccgagtggcgagaacctatcaatatagaagtcagaaagcgatgaacacaaatctgaaacaacttgctgagacaatcgcatttctgtcagacgaaaatattgatacaccagaagaactggaacagcggattcaggaactgagcagccgaggccatgatttgcaatacgatcttgatgaggcggacagtttgattcaggagatgaagaagttgataaaggcatgggatgattatgagacatttcgaccggtttatgaagagtataaaaacaaatttttcggcaaagaaaaatttaaaaagggcatgcaaaagaactgaatcggtactacagagggaaaagaatcgtcatgggaaacaggaatgcagaagggaaagtgccggtttccaattggaaaaaatatctgataaatgcaacggaggagaaggaaactttagaagcggagaaaaaggaagttctggaaaagcttcgaccattgcagaaagtacaaaggtccgttgatctggtaatgatggagatagaagatcagccagatccagagaatttgcttgcagaagaaaaacagaatgcagagatcagatccaaaagaaagatagagtaaagaaaaaattatatggagtggagttataggaggaacagaaaatgtcaagatatacagaagaacagatagcaagagcaaatgaaacagatctggtttcttttctgagggccagaggggaaaaactgaagaaatcaggaaaagaatatcgatggatgaagcacgacagtctgacagtcgatcataatgagtggtatcgctttagcggaagtaaaggaggacatcccattgattttttaatggaattttataatatgtcatttccggaagctgtaaaaacattaatcaatgaattgcccggcgaagataaacaggaagttaaaaaaaacgaacaggaggatgcaggcagccatgaaggctgccccatccccttagaaaaagcgaaattacaacttccaaaagcatatgaaaacaatgacagagtgagggagtatctgacaaaggaaagaaagatctctgaaaagattattgaccagatgcttgcagaagggaaaatttacgaagatgcggtaaagcacaacgtgatatttattggttgcgatccgaaaggaacggttcgttatgcaggcataagaggaacgaaagaaaaataccggggagatgcaccgggatcggaaaaggcatatggatttagccacacgggtacagatgatacgttatttgtctttgaagcaccaatcgatctgctttcttttctgagcgtcacaggagatggatgggaaacccatcactatatttcattgggcggagtcagcgaaaaggcgttgatgcagtatcttgcagatcataaaaatatccgaaagatttatctctgcctggataatgatactgccggaaatgccgcttgtgagaagcttgcagaaaaaatccctgacgataagatggtgatgcgattaagaccagtaaagaaagactggaatgaatgtctgacagcaggaattgatagaaaagatatggcagagaaaattcctttgaaaaagaaacaagtacaggaagaaaatccaattccagtcataaaaatgtcagatgtggaagaaaaagtagtgcagtggttatggtatccatttatcccatttggaaaagtaactctgatccagggaaatccgggaaaaggaaaaacatggcttgcaatggcactttgcgcatattgtacagcaggtagagaacttccaaatgcgcttccaatcaagccttttaatgttttttaccagaccgcagaagacggagtcggagatacgatcaagccaagacttgcaaaatgtggagcagatatgacaagggtccgttttatcaatgaggaagaaaagcagctttccatgacagatgaaaggattgaaaaggcaatcaggcagaatgatgtaaggctgatgatcatggatccgatacagacctatctgggagccaatgtggatatgaatagagccaatgagatacgcccactgtttcgcaatctcagtaatatagcagaacgtacaggctgtgccattgtactgattggacatttgaacaaagcatcgggagtgcagagtgattatcgtacactgggatctgtggatatcgctgcagcggtcagaagtattttgtttgtagaaaaagttgagaaagagaaaagccaagatattcgtgtggtctatcagcaaaaggattccttggcgaaaaaggaaaatccggtagccttttctctgagcgatgaaggacttatttggatgggagaatatgacatttccattgatgatctgcttgccggaaatactggaacaaagaaagagacgaaattggaaaaagccaaaaagcttattcttgaattgctgggaaaaaggaaaatgatgtgtctggaagaactggaagcagagttgcaggcatatgaaatttcggcaagaaccggaagagatgcgagaaaagatttggaggaccagttaaactatggatggtatcaaagcagaaagacaatttcactgaaaaaagattcttaagcagttacattggcaaaaaaaggcattggcagtggcaacgcgtatagagccacttgcttgccgccaatgtcagagaaatttacatagaagaaaatgatgcgagaggagatgaacagatgagtaattatgaaataccatactggaagaaatatacattatctattgaggaagcggcggcatatttccgtattggagaaggaaagcttcgtaaattggtaagcgaaaatcccaatgcagaatatctgttgtggaacggaaaccgtgtgcagattaagagagaaagatttgaacgatttgtagatacacttagtgcaatataaaaaaacaaagactaaaaataaaaaagaaggaggtgttcgaggtggaggcaacgtgatatactaacaatatcatgttgcgtccccttggaggtagaatatgatttcaaagagacgtgatgataaaggaagagttctccagcagggagaatggcaggaaccaagtggaagatatcgttataaatatacagattcacttggaaagcgaaaaatattatatagttggagattgacagaatcggataagatgccggaaggcaaaagagcggattcttcattgagagagaaagaacgcaaagtacagtccttacagatgcagggaatcaccggaagtaagttgacggtgcttgaactggtggaaagatatctttcattaaaaacaggagtgaagcacaatacattagcaaactataattttgtcgtaaatgtattgaaaaaagaagaattttctcataagaaggtggatgacgttaagctgtttgatgcgaagatatttctgattaagcttcagagagatggacgaggatacagttcaattcactcgatcagaggcgtgttaagaccggcattccagatggctgtggatgatgatctgatccttaagaatccatttggatttgaacttggtacgatactggttaatgacagtcagaagagagaagtagtttcattagaggatgagacaagattcctggaatttgtaaagaatgatccacactataaccgttactatgatgcattttacattttgtttaaaacggggcttagaatatcagcgttttgtggacttaccgtgagagatctggatttcaagaatgaagtgatacgaattgatcatcaattgcagagaaccagagatatgaagtatgagattgtatcaacgaaaacgacaagtggaaccagattgctacctatggaagaagatgtgaaagatgcattccttcgtattctgaagaaccgcaaaaagacgaagaaagagccaacagtggatggatatgggggatttttgttcctggataagaatgggaatccaatggttgcacttcactgggaaaagtacatgcagcatgcaagagagaagtacaacaaagaacatttgttacaattacccttgattactccgcatatctgtaggcattcatattgtacaaatatggcaaattccggaatgaatccaaagactctgcaatatctcatgggccattcagatgtatctgtgacgcttaatatttacacgcataccggctatgacgatgcaaagaaagaacttgccaggttgaaagaagcaaagaaagaactggataaaaaccggtttgtaacccaaaaacatgcacaaataactcatgaaagccttatttcgtaaggctttccggataagaaaaataacccatttataaccaaaatgcccgaaaaaacatgagaaaatgcaagaatttatgagaaaaaaagctgttttagaaaaatgtgtataaaggctggaaagccagtatttacaaggctttgagaagatataaggagataaaatgagtaagataaaagtgttattcatctgccacggcaatgtttaatggatgtcgtgacagccttgattttattggatttcttgagtattaaccaataatttacaccttatttatacctttggaagaccggatcggaacaattaaaaaagttgtcataattcagttggtcaaaaaagaatactacactcaaaattaattaaaaaaatcaatcgtaaaaaaatacgattgattttttgcgcatttttgcatataatataatcattatggttggaaagggaacgtttactatgcgtgaaacaagaatattagaattcaaggaaacgattacgaatacttttttgaaaacagttagtgccttttcgaattacaatggtggaacaattctttttggggttgatgataatggaaatgtgaaaggattgccagatgtaaaacaggcctgtctggatatcgaaaataaaatcaatgacagtatatcacctcaaccaaactatacacttgaaatacagaataatgaccagacgataaaacttactgtaaaaagtggtcttcaaaaaccgtatttatataaatcgaaagcatacaaacgaaatgatacagcaacgatagaggtagatacattggaattttcaaggcttgtattagatggaaaaaatattagctttgaagaattaccttgtaaagatcaggagctatcttttgaaattttacagtgtaaactgaaagaaaatatttacattgaaactttcaatcaagatactttaaagacattgaacctgtatgacaatataaatggttataataatgcagcgggacttttggcagataaaaatcatttttcaggaattgatattgttaagttcggtgagaatatcagtattattcaaaaaagagtaacgtttgaacatatatcggttttagaaatatatgaaaaagcacttgctgtatttagagattattaccaatatgaagtaatacagggagctgacagaaagatggtagagaaaataccggaagcagctttcagagaagcaattgcaaatgctttgattcatagggtatgggatattagttcacacatcagagtttctatgtttgatgatagaatagaagtagtgtctccgggtggattgccggcgggaataacggcagaagaatatttatcaggtaaactatctattttaagaaatagaaatcttgcaaatgtattttacagactgggattagtagagatatttggaacaggaattacacgaatcaaacaactgtatgcagagagtttgataaaaccagaatttgaagtgtcagaaaatgctataaaaattgtactaccgatatttgaaacgaatgtcaatttaaccgaagacgaaaaagtgatttacaaatttttaagtaagacgatgctgaaaccaataagtgaaattgcaccatatgtcccatttggcaaatcaaaaacaacacaattactgaaagctatggagaaaaagggtgtgattgcagttgaaggaaaaggcagaggaacaaaatatatcattaagtgattgagaacatagaggggtcaaattacacaatctttcaataacacaaggagaaaatcatatgataaaaattttatttttatgccacggcagggtgaacggactaccgaatgtgtaggtaaaagtgccgcagaactgggcatagtacggcagtcatagtgccacggaactactgaaggactacttctcaggcgagttaaagtggattgtgtagaagtaatcgttaagagagtatatatgtgaaccccttgggaaaatcgttaatagagttctacggagagactactacaggtgaaagttaagtgaatatttgagagaggacgtcctgcaggtgtggggcgtttttgtttgtgatctagtatagaataaattaaatttctgctatatatttttgagatgatgtatggtaaaatagtgttatcaaagaaaggatgatcgctatgagaaaaacatatcttcctctgtcagatgaagacaggaattaccttaaatcattatcaaaaaagagaaccattcaggcacaagtcgtggatcgtgccaggattcttttatataaagccgatggaatgacattccaggaaattgctgataaacttgcaatcagcactgccacggtacgcctttgtgtttcgaagtttcataaaggcggtgtggatgctgcactgtttgatgttcagcgtcctggacgtccatccgaaatcaccgacgatgcgaaggcatggatgatcagtattgcgtgtcagagaccggcagaactcggttatgcgcaggaactgtggacattggcttctctccataaatacattcagaaacatgcagaggaggcgggatatccaagactttcaacagttacgaaaccttatatccagaaattcctcagggaacaggatatgaaaccctttaaaatcaaatattactgcgaaaagagggatcctgattttgaatcaaaaatgcatgaagtcctgctggtctacaaacagattgaaatgcagtttgatgagaatggtgatctcattgttccagacgattataaattgacgattacggtgtcctatgatgagaaaccgggtattcaggcaatctccaatactgcaccggatttacgcccgacaccggaacacggagaggtatatcgtgatgcagaatacaaacgtcttggaacgctctctttgctggcaggcattgatctgcttacaggagaagccatcccgttagtaagtgagactcacaagagttctgattttattgagtttttaaagatactggacaaaaaatatccatcacaggatacaatccggatcatcctggataatcattccgcgcatacttccaaagaaacacggcgctttctggatacgctgccaaagggacgttttaaatttgtgtttactccgaaacatggctcatggttaaacatgattgaaagttttttcagtaagatgacccggcagatgcttcgtggaatccgtgtcaataccaaagaggaattggaagagcgaatttacaggtattttgatgaagtaaatcgtgaacctgtgatttatcactggaaatataaaatggatgaaatcagtgaagaggaagcggcatccgtttgatatagcaattatttaatattcgttatactagttttatttattgcgatacaaagaaaggaaaaatgtaagaaatgggtgaatatgcaatagttgacaccgaaacaggggaagaagtaggagaaataaacagtggagatgtcataatttccgcacatgaacgacagcgtagagccagaatgaaaaaagagcgcgaagaacatgagataaacaggtacaggggcaaaggcgaaagatatatttttgttaatacgacatttgatttttcggatttatccccgtcaacagttacaaaattgatatatcttagtacatatgcggattatgataatctgttgattttgaatgctaaatctaaaaaagagattaagcggtctgatctaccgaaaatcttaggtgtttcaaaaagaacgagtgaaagattctggaatagtgtcaaggcttactatatacgggaagatgaagaaaccggtaaattatggctgaatgatgaaatatttaagcgtggaaagctgaaaagtaaaacagcaatagattatcagcagttttacttcaatggggtacgttcattgtataagtctgcgaacgggaagaatcacaattatttaggatatttgtttcagttgattccgtttatcaacagagaatggaatgttgtctgtgagaatccgtttgaagctgatttggataatgtacaacttgttacaatgaaagatttttgtgcttatatcgggtacaaggatacgtccagtatcagcaaattaaaaaagatatatgatgctttggagtttgatgtcaacggtaaaaagcaaaggttctgtgcattaacatatactggactggatagcggaacagcaagaatttgcatcaatccagaagttttctatgtaggctcaaataaaggacgtgttgatgttttgaaattattctttaaagaataaagtatatagtttttactcggaaattttgacgcagtggggcggtttcctaaaatgcggtatttacggggaaatagtatttgaaaaagtctggtaaaattgcatgataatgcggtggttatggggctttttggcacttttaaaattgctcggaaattttgacgcagtagaatttgacctaacttactgatacacatgttattaagggataatgaactgaaaattgcttttcttcttcggaagattgtcagtgaaaacaatacggaggttgcaaatgggacaagagattgtatgtgatatatgcaagaaagattgtggaattacacactatagaatccaattcagtgaaagctatcacagcttacaaacatctgtaggggatataaaggtttgtgatgattgcgctttaagaatcggagaatttatccaaaagatgaaaggggaaatgtgttgtgaagatgcggtgtaataaatgtggtaaagaaatgaacatatgggatagacaggagaaattttctattcatagtatctgtggatatggaacaaaatatgacggttctgaaatacaattaaatctgtgttgtgactgtatggaagaattgattgatatttgtgttgtatctcctgtaattatggaaagggggagtgatgattgaatccagatataatatatacaacgtctaataatacgattatcatatacgaaactgtgtatggagatgaattatgctattgcattgaacatgtcaagagcaagcatatgactgtttctaaataagaacactgtaaatacaaggcttttcaaagcctaccaaccacaaaaaataatatttgatctatcacattacgctaaaagccgtccggcagaaaaaacggacggcttttttgtgtggatagacagagaggaggcaaaaaataattacagaaatttagtccgtaaaattatgaaatatcacgaattttttgtaaccagcagtttatccctacttcgagacactttgtcccgaggggccccgtccctcgtctggatgggctctggtggtatatatcccccgtcgccgcctgttttttagtacagccgggagtaggccgtcaagggtgcaacgcaccgccgcaaagcggcggcctgcccttgacggtctgccccggctgtgctatttccccggcaagcggcgggggtatatcctccagagccgccccctttcccaagattgggaaagggggggagggttgacccgatctatattcagaatggaggtttttgactatgaaacggccccttgcttacattaccgccgcatggtttggcggtgacagtgaaaacgcagagctggccgcccagtattgccgggcggtctatgaggcgggtttttccccgatctgtccgcccctttatctgcccctgttccttaatgacgcagtacccgaggagcataaaagcggcatcgatatgggccgtgacctgctccgccgttcccatgtgctggtggtctgcggccacaccatgaccgaggccatgaaaaatgatattgccgtggcccagcggctggggatcaccgctaccacccttgagggcatcttaactgtgagaaatgaaggacagctctctaaggcttaatcgttgacaattaggggtgaaaaaacggcttaatatcaacactctttagtggtaagtaacgatacccctatatgtttatatcccctgccctctttataagaaatgttgtcaacatttttgagtacacagagaggcaggaaaataaggctccggagcgatagcccgggccgcagacaacaggcgtaagcgtccgggtctttgggacactttgtcccgaagtcctgcgggtttggggagctccccaacaagcattttcgcagggccagcggcacaagaaaatagcaggtgtggccacacctgccctgcttgccgtttcgtgcgattccgctacatggcgaaaaaaaacggaggtcacgctttcttacgcatcctccgtttctttggcatctttgattgctcgaatgatagtttctaccagccggagctctttttcatccaaggattttaatagaatatcaatcctctttttgcaggcatcatctgcgcttgtgctgggataaaagaattgatccactgatagaccaaacattgttaccaactgataaaatacatttaagctgggatgttggccgtcattttcatggtacataacagtacggggatcacgatcaataatagaggccagttgttcctgtgtcatgccctcacgctctcgggctttctttatcgcaagtcctatatcgtgaaagtcaaacttgcgctcgtcccgttcatatttcatgctatcaccacctaatgtaattttatatttcgggtgatagtatttgaacagtgaataatttcatgtaaccaaatatttaatttcatgcagattcggagtattatatttcttcttttgatatttgacaaaaggactacaatgtgttatcctgtcgttagactacgtggtgttatcataggaggaaaattatgattcaacaggtttcagattcagaattggaattgatgaagattatttgggctaatggaggtaaagccctatatgctcaaatttcagatggcttaactaacaatggctacacatggcagaaaaatactattattactttgttatctcgtttagtagataaaggtctattgaaagtgaataaaattggacgccgaaatgaatattccgctgttgtgtctgagcaagattatcaagcatctcaaacacaaaactttctcaaaaaattatatgaaggggatgcaaaggggcttgtctcaactctaatacagcgagaactgctctctgaacaagattatgaggatttgagacgctattgggaaaggggtaaaatggaatgaatgatcttctcaaaattatactatcattatccttttcgggaacattattgattattattatgctatttatcggaaaagtgttttttcggaaaagagcaaaccatcgttggaaatattatatttggcttatcattatagctcgtttgcttattcccctgacaccagatataagcctaacgggaacgatttttgaaaaaacagatttagtaatggaacatattatagaaacaacacctgccgagagcgaagtaaatatcactcctgctgataaaaacaattttgatacaaacgataaatcagacacgactttctccttgttacaaagttttttatcagtgttctttcaaaatttaggaataatttggttgattgtttctctaattcttttaatacggaaaatcactatttatcaaggctttgtgaaatatattaaagctggacgagaggaagtctcctgtgttggattgttgaatactttagctcagctcggtacacaaatcggagtaaattgtcccgtagaattttatactaatgggctggtttcttctccgttgcttattggttttttccgtccttgcattattttgccgactacggatattccaaaggatgatttgaaatacacattgctacatgaattaactcactttaagcgtaaagatatgttttataaatggcttgctcagattaccatatgcttgcattggtttaacccttttgtttatattatggagcatgaaattagtagagaatgcgaactgtcatgcgatgaggagatgattaggtctttgaacgaaaaagagcggcggaaatatggagatacgctactccacgctatagcgttaggcgggaaatacaaagatactatatcttctgtaaccctaaacgaaagcaaggaattattgaaagaaaggcttggtgctattatcaattttaaagaaaactcgaaagctgcaaaaactgttatggtgagttttgcttttttactgattgtttgttcaatcgttattggagcttacaccattaagaataaacctatacaatatttgtccgacaatagcacacataactttgtaaacaacaacagatcagataacttggcaaaagtaagtagcgatgatttatcggatatatctgaaaatttgaatttatcattagatattgaaaatggaggcgttgtaatattaccaactacttctaatgagctacaagcagtctatgatagtgaattttatgatgttcagcttacagaacaaaatggaaaatggatttttactgtatcgggaaaaacagctagaatgggcgatgttgatgaagttcaactatacattcccgatataaaaacaaaaatgaatgtgaatgtgtctaatggagattttagctataatttaccagaagattgtcaaaatgaagttgatataactgcggcaaacggaggggttcatttcgcatccagcaatcattatgcaaatagcgatattctattagttgctcaagaaaaagtttttatattatatgaggaacccatatatccgaattatttcactcgaactgacacgggattttcttacaaaaacggaacagagctgaataaaatcagcatatctttaatcggatataccagcgtagaatttcaataattgtagtttacattaggcaaaactaataagtgagtaagtattctctgcaataacggcatataaaaaaaccgttgttgtggcggctgaatactcatgcgccaaaacaaaatacagtagccttacggcggttttgaaatagcaaatttcaagccgccgttttcttttgaaaaatgagaatacggagggtgtattaaagttgcccatttttaaggacatggcggtatccgggaggtatcgctatgtccttatttactgttcggctccctaacctgttaaaaaaagcccaccacctaaatgggatcagtacggctatgaatatgaaatataccagtacataaatgaatatataacttcgtgcgtctgtgcggccttatgtcgcccaggcgcttttttgcacttcgagacaaagtgtcccgaggtgcggggcggctcccccgggtgccgctccccgccagccccgtttcggtcactcgttcacccaaacaccgaaacggaggtttattatgactacaatcaatctgaaagatttttattattggcacacacaggatcagtttatcgaggtttccaacgaggtggcggctgtctttctggccgatgcccggtatgagatggcctaccagcggcggctctcccggcacaaggcgcagtattctctggactgtgaggacgggattgaatattccgcttgcctgcacgaaccaactccagaggaactttttgagcggatggagcggttctgccgtctgtggaacgctctcaattctctgccggagatccagggccggaggatcgacgcccacatcattcttggaaaaagcatcaaggaaattgccgaggctgagggcgtacatgaggagtctgtccgccagtccatcaaacggggactggagcgcatgaaaaaaactttttaatttttttcattttacccacttggaaatgatgaaaaaatgtctcggtttatgagaggaggttttcttctcagcacagatgaacaggagcggccccgggcatagcgcggggagccgggcggcgggtgcgctgtgactttctccattgggaaacgagcgaacaacaccaacgccgcaaatgggccgggccagcccagggccacgatccgcctcaggacaggctggccgcctgtccctccgggccgccctctcatccgtgtgggatcgctgtcccgagtatcgttgtctttggacaggtcaagaaaatgtgggcggcgatcccgtaattttaagaaagcgaggtacagtctatgaactatgatccagcagaattggcggccctgttatctgagccgtggagtaacggttcctgccggggctatatgattatggcgatggaaaactgcggctttgccggtgatgacatccgccgtatcatggccgagctccatgagctgtttgacttcgtttctctggaggaggccgaggcccactaccaaaaaagcccctactgacttcgagacattgtgtcccgatgtggagcaagacaagagggcggcactgttccggtgacgtcctcttgcgtttccccaaggacagacgggaggcggtttattgatttgagaggaggttttaccgtgaaattgaatacacaaatgctggaacaaatgaaaagcgttgatattggcgcagtggctcccgagtccctggctgatgtgagcggtatgacctttaacaacgctctccccaaagaggagcgcatcgcctgtttcctgcaggctgttaaaaatccatactgcttttgcatcggcggtgtcggtgtaaaaattgaatttgcggaaagcgggccgtccttgcaggacacgctgacagactttctgctccggcaaaaaagcgggctgtaactttggttatggcctgtttgtcacttcgagacaaagtgtcccgatgcaaaggcatccttgttgtcctgcccgggcagagttataatatagatgtaatgtgatagggaaggaggaacaatggcacgaacaaaaaacagaggatttcagcagagtttctctccctcttatgctgtccgccgctggcggctgggcgcatatatccggctctccaaagaggatttgaaaaaggcccgggagggtaaggacgatagcaacagtgtaaaaaaccagcgtgatctgctgggggacttctacttcaaacaccaggacgaatttgaaagcattaccgagtatgtggatgacggacacacgggaacagacgccaaccgggaggatttccaacggctccttgccgatgtaatgagcgggaaaataaattgtgtgatcgtcaaagacctttcccgtttcgcaagaaattacagtgatgctggcagtctgattgacaacctgtttgtacagatgggtgtccgctttatcagccttgccgaaaatgtggacagctaccgtgacccggacagcgtttccagtatcatcgtcccgattacgaatgtaatgaacgatcaatactgttatcagacctcaaagaaaatccggcaggtattcgattacaagcggcgcaacggccagtacatcggctcctttgctccctatggttatctgaaagacccgaaagacaagcaccagttaatcgtcgatcccgatgcggctgaaattgtaaagctcatttatgatttatgcctgcagggtatggcgaggcgggctatggtttactatctgaacgatcacggcatcccaagccccacaacataccgcagggaaaagggcctgcctgccagttcaacatcggacaatcccctgtggggcgacaaaattgtaaccctcattcttaccaatccgatttatacaggggatttggtacagggccgccgccgggtgaaaagctacaaagtacaccagattgagcaagtgccggaggaggaatgggtgcgggtgtccgatacccacgaggccatcatagaccgggaaacatttgaaaaggtgcaggccctcttaaagcgtgatacccggacggctccccggaaaaaagagctccacctgttcagcggtttcctccgctgtgcggattgcgggaaatccgttacccggagccagagcgggcaaagctaccgttatctttgctcaacctacaaaaaccgctcccggactgcctgcaccatgcacgccatcaagcatgaacggctggaggccgctgtcctgttcgctgtacggcaacaggtacatctggcggtttcctattccgagattattgcccgtatcaattcggcccctgtcaaaaaaagccagtctttccggctggacgatctgatagccgccaaggagcgggaactggcaaaagttacccggtataagcagtctctttatcaagactggaaagacggggaaattacccagcaggactaccgggatatgaaagccgattatgagcggcaggccgcatccctttcggatattctggcccggctgaccgctgaaaggtcggaactggcaaacggtgttgacaacgagcatcccgctcttatagcctttatgaaataccagaacattgaaacacttaaccgggaaattctgattgaacttgtagaccatatcaaggtttatgaaaacggcaatatcagcgtgaaattcaagttttctgatgagctccgccggattgccgagtacattgaaattaacaccactcaaaaccccgctgtggcgggctgattcccgccacaaacctttctgacagtgagtattcttaaaaagaaacattcataaggaaataataaaccatggtgaagcattattaaagtccataattgaaaaaatggaaaagacaggggcattggtctgtgacagaaagcgacaagaaagaagattattgaaattcaaagagaagaacggtcaaaatagtatttcgttgagaaaatatgtatatgcacattatcataatctttctgtagatgaattagcctataagagaattgatctggcagattcgtcttgctataacaataatctaatggatttacgaaagaaaaatctgtttgcaccacgagaatgtgggaaagaatgggtagacgtgatatgccgtcctaataatccaaaagaaaaatatattgttacatatcagaatgaacacattagcgtacaagattatacggcagaattgtattccgtattagcagatagaagtgtatgtgtacccgctccaaatagaggaagtcggcaaagaatacagattcattacaagcatggtagtaaaggatatatgctgatgaatttatcgagatttgtatatatgtattatcaagattatggatatgagggttttatacacagaattccagaagcaagccggggcatgggaacaggaaatgattgcgcccatgtgaatgcagataattggaataattgtgcttgcaatttaatagcaatggagcaatccctaaatatacaaatgagagactacatcaaagcattttctggacgttattctgcatttcctgttatggtgcgtgaagatggcagagaaattgttattttggagataagaagtggcagcaggttcttttactataagtgttgcagttcggaagattatcttgatttgcagaaagtgttattaggcaaagcggtaataacaacacatgtaaagacaaatatagttaatactcgtgagcggttttcgtgtcacattccaacaccaaaagaagaggttagaaatacggatttagtatcaaatgatgtgataaagcaattctggaagtggtgtgacaacagggacaggcttttgaatttgtacaacacagtgccgtctttatttacagaatggatagcatgtgaaaaaaatatgagtgtacagatattgcttaatcagttagtccctgttttcctgggggatattgtctgagaagtataaaaaggcggtaacaaggggcttttctatcatataagtcaaaaatatctattggttgccaaaacgtttttgcgttttaaaatacgtgaaaagatacggaaatatagggtttacggggcatgaaaacagagaaaaagtaaacacatatcacggtaatgtccgtgtttacaacggaaaataaaaagcaattatggaaaaaatatagcgataatatcggtagttatcggcttaactatggagaaaagaggattaggatggaaaatataaattgtataccgtattggaatcagtacacgttgactattgaagaagcatcggagtattttcgcattggagaaacaaaattaaggagactggtacacgataacccaaatgctaaatatcttttgcgtaatgggaatcgtattcaaataaagcgtgtcctgtttgaaaagttcatagattctttagatgccatttgaaattgtgagtgaattgttgacagcgggagtgtggcatggcatactgaaatcaatgttatgtcacattcttttcagcttggaagaaaggaatcaatatgagcgaaaagagacgtgatactaaaggaagagtattgaaaacaggagaacatcaggagaaagacgggaggtattcatatcggtatacggacaatatgggaaaacgccgtattataagaagttggagattaaccaatgcagatgtaacaccaccgggaaagaaagtgacaccctctctgagagcgcaggaacaggaattacaggtacaaatatgcaaaggaatctttccgacagaaacgacggtctgtgagcttgtagagcgttatataaccactaaaacgggcgtgacgcataatacaaaagctggttataaaacagtgcagaatatactggaaagagaagaatttggacataagcaaattgataaaattaagttttctgatgcaaagattttcttaattaagttacaggaaaacgggagaagctacagtgcaatacattctatacgtggtgtcttgcgtccggcttttcagatggcatttgaagacgaggagatcggctacaatccatttaattttgaactggcaaaagtattgattaatgacagtgtacagagagaagcattgaaaccacgggagcagagattatttttaaactttgtaaaagaggacaggcatttcagtaaatattatgacgggatagctattctttttaagacaggtttgagaatcagtgaattttgcggtctgacagtgcatgatatgaattttgacgagcatacgttttctgtcaataatcagttacaacggacacgggagggtgaatatattattgttccgaccaaaacgagtgcaggaaagagagttcttccaatgacaaaagaagttgaggaacattttagaaagataatagaagaacgggagaagccacgtatagagcctatgatagacggtaaaagcggcttcttgtatctggataaaaacgggaatccgtcagttgggttacattgggcgcactatttcaagcatatatgtcagaagtacaatagtatttacaaagtgcagatgcctacagttacgccgcatgtatgcagacatacatactgttctaatatggctagaagtggtatcagtgctaagacgttgcaatatttaatgggacattcagatattagtgtgacattgaatgtgtatacacatttaggtctggaagatgcacagcaagaattgaaacagctagaaaagcgtgtaaattcgcaatcttcaaaggttgtcaatttctaaaattatattatttatgccgtgaaaaagtggaaaatattatggtgttccagatttaagagaaatgtaccaatttttgtaccaaacgtcacagaaattacaagaaattgtgaaaagatataagacaaacgggaatttgttaaaagctgacaaatgcagtaaaaacaaggacttgaaaagaaacaaggagatataagaacaatgataaaaatactattcatatgccacggcaatatctgccgcagcaccatgtcccagtttgtattccaggacatgatcaaccaaaaaggtctcactgaccagttttacattaattcagcggctaccagccgggaggaaatcggaaatggtccccattatgggacggtaaataagatgaaacaggttggaattccggttcttccacacagggcggttcagatgacaaaaaaggattatcgggagtatgattatctgatcggcatggacgaggccaatatccgaaatatgatgcggattgcaggcggcgatccggaggggaagattcatatgctgcttgattacagtgattcaccaagagccattgcggatccatggtatacaggaaattttgatatcacatatgatgatgttgtggaaggatgtactgctttttttaattatctggaggaaagtggcagtattttttgattgaaatagtgcgaaatcaatcatgtgcggagagtgaggactgttgtattatggtacaggccgctgaggtctgtcagagaatataataaaatagttatttggtacttccggagggagaatttgtcgatgaaaaattctttacatccgccagcattgcttatatactgatagcagagcagctcttttgggaatcaaatcccagtctattttcttagctgtaaaggagtaacatcaaacagtacatatatagaggctgcagagtgtacatataagagcaagcagcttctatagataggctgtaacagggattagaaataaaaattttatgtaattttcccaatgtgcttatttacagttcttaaaacgtaatcaggcctaagcggtcttattaccgtatctaatcaatttcatgggtgtttcgcccgggctcacaggaaagaatgaggagtataaatgcaggaaggttatgaatgttttgtagaagactttcgccagaggcttctggaagccacaggatttggggcagaaagaatttattataagaaaaaggaagagtacccggttacgccgggggatcgattgtttataaagcgcagggaagccggggaaattgcagaaatctgtgcactgtatatttcagatctttatgaagaatattgccagggagcagagatagaaggtaagcgcttaaatcttgggtagctttactgtctacgtttttgaactcataatgatagcaaatagatttttactacactccgcttgataggagatagaaatttactatatttggaggtttcattatgagtaataaacgtgctccaggacgttccctggacgaatggatggaactggtcaccgaatgcagacaaagtggcctgacagatgctgcatggtgtaatgaacatgggatatctcccagctgtttttacaatgcagttacccgtctccgcaaaaaagcctgtcagataccggatccagttggaaaagccagcactcttgaccttacgtcccataaacaggatgtagtccagattgctatagaaccggagtattctccggcaggactgattccagataatggaaacagtcctatgcaccttgacaattcacatacgattgaaatcgaagcagacggattgcttatacgaatgagtaatgagatcaaaccggtacttctgaagatgcttatggatacgctgaaggagtcattatgttagcggacatctcaagtgttgatgcgatctatatcgtctgtggcagaacagatatgcgcaagtccattgatggattatgtgcgatcatccaggaacagttttcgatggagatcgaccatgcactttttcttttctgcggtcgtaaatgcgaccgtatcaaagctattttaaaagaacctgacgggatcgttatgatctacaaaagactgaccgcccagggatcttaccggtggcccaggaataaatctgaggtccggaatcttacatggcgggagttcgactggctgatgtctggcattgatattgagcagccaaaagcgatcaaggcaacgtaaaaaagatgcacataaaactcttgttttttgctgtattttcggcactttcaaggtctggtaaatccgctgttttgctgggaaaagccactgttttctggtataatggaaacatcagaaacaggaggaaaaagcagtggcagacagttccaaagatatccagctccgtgagctgaaggacatgataaacgatctcaaaaagatgataaaaacacttcaggcaactgtcgatgctgccaataaacgggaagaggctcttacccaggaacgggataacctgaaagaagagatagaccttctccgtaaaaaactgtttggcacctccagtgaaaaaagaaccatcgatattccaggccagttaaactttttcaatgaagcggaactggaacaggatccagaagctgtaaaagcagaggatcttgaggcacttcttccggaaaaaacagcaaaaaaacgaaaagcaagagctacagatgctgaacggtttaagggagttcctgttgagaaaaagtatctggaactttctgaggaagagaaactctgccctgcctgtggtaccccactgaaagaaatcggggaagagtttgtccgccgggagctggtttttgtaccggcaaaactgaaagtatatgaatactacagtaagagctatgagtgcccgcagtgcaggcttcaggatataccggttatcaaaaaaggaaaagatggcagatcccatatgctttatggaatggcttctgccggaacggttgcctgggtaatgtaccagaagttttgtaatggtcttccatactaccgtcaggaaaaggactggaaacagtatggcgtggagatcaccagagctactatggcaaactgggtgatccggaattctgaagcattttttcttcctatgtacgaatacttccacaggaaacttctggaacgtggattcgcgatggcagatgaaacgccacttcaggttctgcatgaaccggaacgccgcgcgcaaaccaagtcatatatgtggctgttccgcagcggtgaagacggaggaccacctattatcctctataaatactcggagacccgggccggggacaatgccgtagattttcttcacggcttcaagggttatctgatgtgtgatggctatagcggatacaataaagtaccggatgccaaacgcacagcctgctgggcacacatcagaagatatctgacagatgccatccctaagggaaaagcactggattatacccagccatctgtacagggaatgctgtacattaaccagctcttccatctggaagatgtgatcagatcaaagtattcttccttcgatgctataaaaaaggctcgccttgaaaaagaaaagccggtagtagaaggctttttgtcgtggcttgatcagcagaaccctacccgtggaagcagaatggataaagctgtcacctacattcagaaccgccgctcctatctgactacctatctcgaagacgggcgctgcagtttttctaataatctcagtgaaaatgcgatccgtccgtttacagtaggccgtaaaaactggctgttctgtgacacaccaaacggagcccaggccagcgctatcgtgtacacaatggtagagatggcaaaagccaatggcgtaaacgtctatcactatcttacttatctgctggaaaaactacctgatgatagaatgagtgatgatgaattagaacttctggctccatggaaggaaaccgtcaaagctgaaatcgaacgtcgtgcaaacggatcaaatcaatcatatgtgaattgtcaaggtgctccgactactgaaaagtagtcggggatttttctatcatacctaaaaattaagcggttctttccatacttagttgaatttaacgtgaaagagttctccgaatagcactttcgctttcaatagttcaaaactgtttcgaccatacattacccgttttatgactttgattttatttacactgccttctgctaagccattattatacgaatatataattccattttttacagctgttatatccttttttatgccgttcatgaatgtttgaagttcagggatatcatatttttgtgctgcattgatccattcatctaattttgtaggatttttagagaatatgacattacaaaagtctttggttaatgtatataactcactcaataaaggatatttttttaatacttcctgatactgtttgacagtgattgtgccaatatcctcgagttttttataaaccaactggcataaggatttcctttgcacatattcagaatgcggcttttctgtttcattctgttcatgcattcgtgttctttctttttgcataaacattcgtaacgaagctacactgccagtatatccctttttataaataatatcatgtatttggggatacgttaatccctgactcctgagttttattacctcgttctcatatggagctaattttcctggaattcgaacattatagtgaccatttgtaactgaaaaatcaggatttaaataattctgtatagtcttatgggcacggtgcatctgagatgcaatctgctcaatcggatatcctgccaaagccatttctcttgcttcttttatttcctgttctttttgttttattgccagctggtgttgccgttccctggcaatttccttgctttctggaatctggtcttctggaatcgcaagatatttttggattgttttaggtgatgaatgtaacaataatgctatatccgatatggtcagtccttccctgcgtttttcatgggcgaattttatacgcaatgaccggtttgcagtgttatataatgctttcatttcatccgtaacgctttctgttaatggtatttcaacccttgcaggaaactcacgaaatatatatttacagataacttccgaaagtccctttatcaagtgaaaacggtcactaatctgtatgacatcaggatgagaatttgtagcagcggatgcgtatgtaatggctccatcccttgaaataacttcgatattgtgaaacgttttcagccagttgcagacatcatttgtatctcttgacggaatcatatcaacaatccgatgattttccaaatttatcataactgttccataagaaaatcttttacggagagcaaagtcatccacacataccatttttacagaagatttatccacaatggatggcattttttttaagcagagcacagatgctgcttttgcaaactgaaatattttcgctttttaaaagtttagaagcattcaacgagcttagttgggatgatgtatataaaatattttggattaacctgttcgtttttttcgatttagcagccacaaatggatgtttctcggaaaaagttttatgagaacagtccagattcatacatcgcattttcctggtatctaccaacagaatgaccttttttccttgcataggaagatcttgaatttctctttcataaatagaatgaactttagatgtttttcttccacaaaacggacattctaattcagttattgttgatgcaatatgaaaaatcactttatcttcttttatgcgatattgtattagttcataggctgggtcaagtaacttaataaattcgtccatataaatatccctcttggtaaatatattttgaatgtattatataactttaacacatcaatttcaactaagtgcggaaagaaccaattaagcgcttacgatagaagagcttctcggtgatgttatgaaacggctggaaagtttttcgagaacagacattgctaaaaaggttaaacttctgaatgattatgaaaagataaaaaaggagctttttatccggcttgtaaatgtacagaggaataaaagtgatctggaagacgctgtgtgcagagtcctgggagatattgcaatggttctctatgtgaaaatgggagaaatggaacattatatgaccagtatgaaaattaagcggcatatgataaaacactggaacagggacgaggataagatatttgaagaagctcttttgaatacgtatttgatttctccgccaagaatttactgctgggaaaaaatgatttttgatccaagatatgacggggaaaattttatgaatatactcgcagattatccaattagaaaggatgccataggaaattgcctgagtacagtaaaaaggacaaatggtgcagttgcagtctttcttccgggggtagcggagcgactggcaaatctttttcaggggaatttttatgtagtatttacaagtatacatgaagtgatgattcataatgcagccactgcagatccggaagatcttcgcagggttctggaggatactgtaagagataccacgccggaagaggactttctgacactgaatatttatttttatgacagagataccggtttgttcagcctttatcaggcacaggaagcagaagaacgctgatactttagaatggcagagaaaatgcgatagttctggtagaaagataacgcagaggaaaagtctgcatatactgttataaaaggaatatcagggggaaacacctttgacatataaaattgtacttgacgcaggacacggaggttgtagataacgcaagtgatgaaaacaacgaaaatacaaggagaaaggcaactgttgtacctattaaaatagaatatgtgtgagaggacaagccttttaataatgtagacgttcagaaatgagcgtctatttttatacccaaaatgaaaggagcattagatttatgaaaaagatgttaaaacgattgtgtacgggcttcttagctcttgcaactgtcgttactgctttaccgactacacccgtccatgcagaaagcaagcaatactggacggaaagtgcagagcgtgtcggtatcattgaaaaagtaatgaatgacggttctatcggttcgacattcaatgagggctatatgaaagttgagggcgaaactgcctattgtattgacatcaatacagattttaagaatggttacaagaccagagctgacgcaagcacccgtatgagtgccgaccagatttcagatgtggcgttatctttagagtatgtcaaacagtatgacgaagctcacaaggaactgaactataaacaagtttatctgttggaacaatgtgttgtctggcagagattgagcgtacatcttggctggcaatgtgataacgtgcgagcttcttatgatgaaattccaaaggcaacacaggacgaagttttcgctggtgcaagagcctttgtcaaagaaaataaaggacgctatgaatgtggcggttatatctactctggcgaggggcaggaattgggacaattctgggcgaaactgaatgtcggaaatacgaaactgcaaaaggtttccagtaataccagcattacagacggtaacgggaattactctattgcaggtgcgacctatggtgtcttttctgataaggactgcacgaaacagcttgccacccttacgactgatgaaaacggaaatacggacgttgcagaggtaaaagcaggcacagtctatatcaaggaattatccgcaccagcaggatataaagtagataaaacagtatattccttaaaggttgaagctggaaaaacagcgactttgaaagtatcagatacaccgaaagtaacggacactttgattgaacttttcaagatagatatggaaacacagaaaggcaatccgcaagggaacgcttctttagcgggtgcggaatttacatggaagtattatgctggcttctacaataaagacaatctccctgccgaagctactcgtacatgggttacaaagacaatcgctgaaacagacagcgacgggacaactcactacatcacaaaattagcggacgcatacaaggtgtctggcgacagcttctatatgcaggacggcaaagcggttcttcctttaggaacactaaacgtagaagaaacaaaagctccaaacggctacttgttagacggtgcatatatgcaggctggcgataagtccgaacagattaagggcttatatgtaacacagattaccgaggacggcgaccttgccgtactatctggaagtaaccagttttccgtatcagacaaggttatccgtggcggtgtcaaaatacagaaacgagatttagaaacgggcgatacaaagccacaaggaagtgccactttgaaagatactgcctttgacatcatttccttaaatgataattctgttttggttgagggcaagctatacaagaaaaatgaagtcgtaaaaactattcgtacagatattgagggtgtcgcttctacttcttctgacctcttaccttatggaaaattccgtatcgttgagagtgaagctcctaacggatatttgacagacggtgcaaaaccgattgattttacaatcacagaaaatggaaaaatcgtggacttaaccgacgaagcctattctatctataatcagattaagcgtggagatattgagggtgtaaaaatcggtgcaggcacacacaagcgtcttgctgatgttccgtttcggatcacaagcaagacaacgggcgaaaatcatgttgtggtaactgatgataacgggcagttctccacttcttctgaatgggcttcacataagcacaataccaacgcaggcaagacaagcgaggacggtgtatggtttggaacttctgaaccagacgacagcaagggtgcattaccttatgatacctacatcattgaagaattacgctctgatagtaacaaaggctttgaacttatcccaccttttgaaatcgtggtatcaagaaataaccttgtgattgatttaggaacgctgactgatgaatacgaaaaagaaatttctatccataccacagcgaccagcaaggacggcgaaaaaactatctttgcaggaaaagagattacgattgttgatactgtaaaattggacggacttacaaaaggcacaaaataccagttaaaaggctggcagatgttaaaggaagaaagcgcagaacttcttattgacgggaaacgtgtagaaaacgattatacctttgtcgctgatgaagaggaaatgaaagtggaaatttcctatacattcaatgcgtctactttaggtggcaaaaaccttgttacctttgaagaattgtatgatttaagcaatccagacgaacccgtgaaagttgcagaacacaaagacattgaggacgacgggcaaacggtacttatcacagagcgtatcatcaagatacatacgaccgctaccgataaggacggcaacaaagagcttgaagcaggaaaagacgttacaatcattgataccgtaaccttagagggcttagaaatcggtacacagtacaaacttgtgggctggcagatgttgaaagaagaaaatgcagaatttctaatcaatggaaaacgtgtggaaagtgattatacatttactgctgacagcgaaactatgaaagtggaagttgcttttacctttgacgctacttcccttgacggtaaacagcttgtaacttttgaagaattgtacgatttcagcaatccagacgaaccgaaaaaagttaccgagcataaggacattgaggataagggacagacgattacctttaaggaaaaaccagaagtcccagaagaaccagagaaacccgaaacaccacagacaccagaaaagcctagcagacctagcgacagtcccaaaacgggcgataacaccaacctttacggactgcttgcacttcttatgacttctggtgctggactggcaggtattttcttctacaaacgccgtaaaatgaagaaatcataaggtggtaacagtatgaggaaagaaaaatcacgctctccgccgaagctgtcaaacggcagacttccgcttattctggcttgtctgcctacaacctgcaagaacacggatagtcaagggtgcgtaagcattgattttaccctttactatctgtgggattgctggtactttcccaaccgccagaacaagaaatcacaatcaatttatcaaaaatagaaagaaacgaggtaaaacactatggaaatgaaatatgtcgtgccagatatggcacagtcttttggaactcttgaatttgcaggcgaaagcgagccagtctttgaaagagataaaaataatcgcagggtcttagccagacgaagctataacctttattctgacgtacagaaaggcgaaaatgtggtcgtggaaattcccgtgcaggctggcgaaaagaagttcaagtatgagcagaaagtaaaacttgtcaatccgaaattatacggcagagggtacgcaatcggggatatgggacataccgattatgtgttgcttgctgatgatattgtagcaattgaagaaaagtaaaggagtgaagcatttatgagattatcaaacgggtttgtcattgacaaagagaaaacatttggagaattaaagtttacagcggtgcgtgatgtgttcttgcagaatgaggatgggacaccgagtacccagcttaaaaagcgtatctatgatttgaagtgcagtctgcatggtggaattatccccgtgtccgtaccgccagaagtaccgttaagggaatttccttacaatgcagtcgtggagcttgtcaatcccgtagccgatacggtatcacgaaaaacctatacgggtgcagatgtggactggtatgtaaaggcagaagatattgtactgaagaataaaggcaatcagaacacaggcactttacagaaccatacaccgcagggacaaccgaaaaaatagacttgctgaatagattttcgttgtagaggatatacggaactgttataatatgggtatgaagaaagcgacaaattagaatttggaggagaaatatgaatataaaaaaattttggaaagacgttcttgctcaagataagaaagaaatcagaaaatacttccataaagaagcctatgtaaattggcattgtaccaatgagcattttactgtagatgaatatattactgcgaattgtgagtaccctggagaatgggatggaatcattgaaagaatagaaattgtgaatgatttaattattacagtagttcttatctatcctaaagatagaagtgtttcttttcatgtaacttcgtttattcaaacaaaaagcgataaaattatagcaatggatgaatactttgccgatgatggaatggcaccacaatggagaatggataaacacattggaacatccattaaataaattctttaggttagaatcgatgatggggtaaacgaaaaagcagttttggcattccagtgaactgccccttcgtttactccattttcgatttgacctaattgaacaaagtgagcgtccgggtagctgctacctatggactttcaatcttttcttcttatccataattatacaggatttcctgtgcagacgctacagaaatcaagtgttttcagataaataggtacaacaataaaacctctgactttgaggcttaaaaaacatataaagaaagtgtattttaacacctttgcggcattcgaagttggggcttcccaagatgtccgccgcaggatttacatacacagatgtttatcccgtatagctgtttcagtatttccggcatctctttatccctgagctttgaaagatattttttgcatccaaggagattctggcataaagtgagttttttgtgtttgctgcgggaacatagaagtccgtaatgccggatcctgacaaagcgtttgggtggcacatgcatcagaaaacgccgtgtaaattcaataccggaaagtgtcagttctttccattgtccttcctttcggtaatccctgacagaaaaagtaacattttctttgtccatacggagaatacggtgattgctgatagtgatcctatgggtatactttccaaggtaatcaatcacagattgtgcaccgttaaaagttttcttacagtaaggaacccattctgcgtcataacaggaatctataagctctttgaattcataataattacggtatttttctgctgttccatgaaactcaagctgatctgtattccagagatttttcaactcatccatatatttcccacgaaagactttggagatagcccatatggggagaaaaaactccgtaccattgtctttccactcatttttcggtgtcaggccgccgccaagcagtatcgtatggatatggggatgaaaattcatttctgagccccatgtatgcaggatgcagatataaccaacagaagccccgaggtgctttgggtcggctgtcagttcctgaatagtagcggaagccgcatgatacagcgtgtcatataacagtttctggttactgtaaatgaccggattcagaatgtcagggactgtaaacaccagatggaaataaggtgcatcaagtacatcttctctgcgagcatccatccacatttcctttggaatagcctgacacatgggacaacagcggttacgacaggaattataatgaatctggacagcaccacagtcttcacatacactgatatttgcaccataggctcctgttttgcagttcaggatgttccggacagcttttgcctgttccggggatggagaatacttttcaaggtatgccggataaaaacgtcggaaaatatcctggacggtgggtttattcatggccagtaccttctttcctgtcaaaagggctttgaatgcccatgagggatttgttgctgacatgaagataaacttccgtagatttcgggtcacggtgtccaagcagtgcctgaatattctgccgttctacgccctgttccatcagatgggttgcaaagctatggcggagacagtgcggggttaccgcctttgaaagttcagcatcggctactgcccgccgcatgacctgttccagagtattgacagtcaggtaattaccggtaaatttatttggaaacaggatgccacggggacgtcctttctcaaaccagtattgtgtaaggatatccagacaacgtctggacagaatagtatagcggtccatccggtttttcgtatcccggacatggatctgcatattagaacgggaaatgtcatcatagtgaaggtggattacttcagaaactctcatgccggaggaatatatgactgcgaacatagccttatatttaatatcatcaacagcatctaacagacggttaatctcagaggtggtcagtacagtcggaagcttgtgttccaggatcatacgtggaactgtgatatcatcccaaaggatatgcaggacattccgatagaaaaaacggatggcagaattataaagattcagagttgtggctttcagtccttcctcttttttcgcaagcaaaaaagtcctgacatcctgacaggtaagctcttcaggattcttattctgatatttcagaaagtaagaaacatagtttttatagcagctgatggaacgttctttgaggttacggatttttccagcttcctcaagctgttctaaatatttttcatacataataaaatcctccatataaaatcagtagttatcagaaacactgctttatacggaggtgcattggggtcataaaatcgcttgccaatcaagcggaagggtggtattcttttcataggcagtggagaggtcgatcctgtttaattgttattttgtggtgatttaacaatactacttttaggacttgctttccactgttttgttatagaaaaagaaaatcgctatgccacagccttggcaggccatcgcgcagcgattttgttcaattccagtttgacaacttcatatccatgcacacaaagcagttagtctatacgattgactgcttttttcatacccagaaagtccagctaataaatgtcaatagataaatgaaaaatattttctccataaaaaagggtacacttatcccttggtgaaaatatcattttgcaaaaaaagatattggttcgttggattaacagtattttatgcagctatgtcgcatttagcagcattgtattgttgaatatgctcctgcggagtaatgatttcaaaaggtttgttatctctgagtattgcaaatatcatattgcacaccttgtgtgaaacggcacccattgctacaagcttaggttttgattcacatttcttcagatagtaatcacggagtaccggattttttgcttctcctgtacgggatgtgctgatgctttgtaaagtcagtgtatgaatagctcgtctggctatagcagatcctcttttggaaatttgaatcttagttccttcgaatttaccagattgttttactgctggatcaagaccgaaataagcgaaaagttgcttgggttttgaaaaagcagagaaattaccaatctctcccatgagagttacagcagataagaaaccagcgcctttgaacgtttcaactaagtgaatctgtttgacgaagtcagtttcttcattggcatcaataagctcatgcatagcatcgagaatgtttttgatttcttcgtcgtacttacggatgaagctgatatataaacgaatacgtttgatattgctgtctaaaatatagccaaattcattagcatcatgagcggcttgaataatggcattgtatttgctggcagcatatgcaactccaagacgtgcagttgatttaatggtatcaataatctcttgcgggtctgcttcaataaaggcagatggagatgtataagtttccaataatgtaagagatgtattggctgtaatcttggagaatataccaagatactgtgggaaagccatacgcaattcgccttgaagcttgttcacgtaagcactgcggttatccattaaatcgtagtattcacgacagagattgcggcagttcaaagcaaggtcagaaggcataagagaaacctttagatcaggcttcaaaccaactaaagccgcttttttagaatcaaaacggtcattatgtacttttcgtatgttgatatttgtgctattcttagtgatgataggattaataaccgagcagttaaaacccttatcacgaagatagcagaagagtgggtaatgataaattcccgtggattcgaggaaaatgcgactttccaaagaatacaactcttctgcttcttttattttagaaacagcagttgcgagggaattcatttgattatgtaggattttataaggttttcctataatctgttggttaggaagtgcgatagacatccaggagaagtcagcaccaacatcaataccaacagagatgaataaatcatcaagattaaaaataaatttgtttgacatgagcgatagctcctttctgataggaatccatttccaatctggcaggtacacaacctagcacgttatacgggtatggccttccggctcccaaccagctaaaacataaaaccctgtcgaatggactaattgactttcttgtaggtatctgctggtgaaatcagcatcccaaggagtgatacattatttgtcctatcctaagagatgataccttatgctttctctggtgtctatcaggaaccgtcagacatgataattatttaggataacatctgatgaaggaagaactccttcttctgttatctggtatatagaaacttattaaccaagtagtcttactgactacaccattattatactaggagtgattgatttatgagaatgattttaaacaaaggacaccgtatcagagccagcgataagaaccttgtctatcgcttttcaatggggacactcctgtttgtgttcgtagcggttatcctgctattaaatacaaaacagctcatgcgtaccgactgggaacatttcagcttattagacaatggctttacgctttccctttacaacttcataaccatactgatagcgactggtgtttgtgcattggtcgcttttctgtattaccgcttctgttacgacagtttcaaaaagctactgcaccgtcaaaagctggcacgaatgatactggaaaacaagtggtatgaagctgataccgtacaagacagcgttttttttactgacctgcaaagcagatcaagggaaaaaatagtctggtttccaaagatttattatcaaatggaaaagggactgcttcatatccgctgtgaaattacgctggggaaatatcaagaccagcttttacggttagaggataaattggaaagtggcttgtactgtgagctgaccgacaagaccctgcatgacggctatatcgaatataccctgctttatgatatgatagcgaaccgtattaccattgatgaagtacgagcagaaaacggctgtcttagactgatgaaaaatcttgtctgggaatatgacgcactccctcacgctctgattgcaggtgggactggtggcggtaaaacttattttctgctgacgctcattgaagccttactgcataccaacgctgtcctttacatcttagacccgaagaacgctgaccttgcggacttagggacagttatgggaaatgtgtatcacaccaaagaagaaatgattgattgcgtcaatgccttttatgagggcatggtacagcgaagtgaggaaatgaagcaacgcccgaactataagacgggcgaaaactacgcctatctgggactgccaccctgctttcttatctttgatgaatatgtggcgttttttgaaatgctggggacaaaagaaagcgtgggcttacttagccagttaaagaaaatcgttatgttaggacgacaagcaggatatttccttatcgtagcctgccaacgtccagacgcaaagtatttctcggacggtatcagagataacttcaatttccgtgtgggacttgggcgtatcagcgaattaggttacggtatgctgtttggttcagatgtgaaaaagcagtttttccagaagcgtatcaaggggcgtggctattgtgatgtgggaacaagcgtgataagcgaattttacacgcctttagtcccgaaaggacatgattttttgcagactatcggctctcttgctcaagcaaggcaggacgggacggcgacgtgcgaagcgaaaggcgacggcacggactagccgttgctggtgtggcgaagccacgccagcaggtaaaacccctcggtatctaacagaggggtacgtttgcaaatagacaatagacaaaaaacataggaaacataaggcttctggcatggtttcctagtaaaaatcggttgtgaagtcgccttaaaaaacttcacactttacagattgggggtatggttctgaatgaagaacaatggataaaagaattacgggagaaacggattgcttacggtatctcacaaggcaggctggcggtggcttctggtatcacaagggaatatctcaacaagatagaaagcggaaaaatgaagccgtcaaaggaacttctggaaactctgcataaagaactggcaaggttcaatccagaagcaccgcttaccatgctgtttgattatgtgaaaattcgttttcccacgctggatatacagcacatcatcaaagatatattaaaattgaatatcaattatatgctccatgaagattacggacattacagttatacggagcattattcattaggggacatctttatctatacgtcggctgacgaagaaaaaggtgtccttttagaattaaaggggcgtggttgcagacagtttgaaagttacctgctggcacagcaaagaagctggtatgactttctcatggacgcactcatagacggtggcgtgatgaagcgtatcgaccttgctatcaacgaccatacgggcattttggatattccagagcttgcggaaaaatgcaggaaacgggaatatatcggaaagtccagaagctataagttttaccagtcgggcgagcttatcaagcacagagaggacgacagagaatatatgggacgtaccctttatcttggttctctgaaatcagatgtgtatttctgtatttatgaaaaggactatgaacagtacgtcaagttagggacacctctggaagaagccgacattatcaatcgttttgagatacggcttcgcaatgaacgagcctattatgcagtacgagatttgctgacctattatgacgcagagcagaccgccttttctatcatcaatcagtatgtgcggtttgttgatgaagaaccagacaagcgaaaaaatgactggaaactcaatgaccgctgggcttggtttatcggagataacagacagagcttgaagctgacgacaaagccagagccttacaccttagaccgtacattgcggtgggtacaaaggcaggtagcaccgaccttgaaaatgctgaaaaagattgataagggaaacggtacagactacatggaaacaatcgaacagcaggcaaagctcacagaaaagcatgaaatgataatcaaacagcagacgacccctgcaaaagatttggtggaaagttaggagtgataaaaaatgtgggtattattaaaagacttcctgctggtatctatgggaatgggtatcggcgtagtcttgatgtgtattttgaatgtcggcaaagaagctgactatgaaatgaaacaattaaaagaaagcgaggacaattaaatgaatttcggacaaaatttgtatcaatggtttttatcaaatgcacagagcttagtgcttatggcgattgtggttatcggtatctacttaggtttcaagcgtgagttttccaaacttatcggcttcttggtagttgccttaattgctgtcggtttggtattcaacgctggcggtgtgaaagatgtactgttagagctgttcaataagattatcggtgcataaaattttattgtggtgctgatatgagaatggtataatttagaatatgaaataaaacgaatacgatttgaggttgaaaatatgattatttatagcaaattggaaatcaatagaataaaagatttttgggagttattaaatcgtttagatactgaaacagattatatgatgtacgaaccaaatgaaagaaaagcgaaaactactgttcaagaattaaaattagatattcaagacaatgtaattcaaggttttgattttttgcaggtgtcaacagaaaatgacaaaatagttggttatattagagcagaaagaggaaaatttgaaagaaattttcatacggcatatattgttataggtatcttaaaaaaatatagaggaaaaggtattggaactactttttttaataatttagatttatgggctaaaacaaataatattgtccgtttggaactgacagttgaatgttgtaataatactgcaaaaaacttgtatgaaaaaaatggttttaaaattgaaggaataagaaaaaaatcaatgtttgttgctggttcttttgttgatgagttttatatggcaaaaattctataaaataaattttcaacttcattatttacaaagtaattggtcttaggattgactgcttttttcttaccaaagtttcagattggagtgatgaaataatgtactgttagaactgttcaataagattatcggtgcataaaattttattgttgtgctgatatgagaatggtataatatggatatgaagaaacggacaaattctttaggttagaatcgatgatggggtaaacgaaaaagcagttttggcattccagtgaactgccccttcgtttacaccattttcgatttgacctaattgaacaaagtgagcgtccgggtagctactacctatggactttcaatcttttgttcttacccatgattatacaggagttcctgtgcagaagctacagaaatcaagtgttttcagataaattaggtacgacaacaaaacctcaagctttgaggctttagaaaatgtatgaaagaataagattttaacatctttgtggtattcgaagctgtggttttccaagatgcccaccacaggatttacacacacaaatatttatttcataaagctgttttaatatttccggcatctccttacctcgaagcttcgagagatacttttggcatccaaggagattccggcataaagtaagcttcttgtgtttgctacgggaacaaagaagtccgtaatgccgaatcctgacaaaacgttttggcggtacatgcatcagaaaccgtcgtataaattcaacaccggaaagggtcagttctttccattgtcctttgttccggtaatcttttacagaaaaagtaacgttttcatcgtccatacagatgatgcggtgattgctgatggcaatcctatgggtatactttccaaggtagtcaatcacagactgtgcgccgttaaaagttttcttacaataaggaatccattccgcatcataacagaaatcaatcagttctttgaacacataatggttactgtatttttcggcagttccatgaaacttaagttgattcgtattccagagatttttcaactcatccatatattttccacgaaagactttggagatagcccatataggaagaaaaaactcagtaccgttgtctttccattcgtttttggatgtcagaccaccgccgagcagtattgtatggatatggggatgaaagttcatttcagatccccatgtatgcaggatgcagatatagccgacagcagcaccaaggtgctttgggtcagcagtcagttcactgattgtagcagaagctgcatgatacagggtgtcatataacagtttctgattattgtaaatgattggattcagaatgtcaggaactgtaaataccaagtggaagtagggtgcatcaagcacatcctctttgcgggcatccatccacatttcctttggaacagcctgacacatgggacaacaacggttgcggcaggaattatagtgaatctgaacagcaccacagtcttcacatacactgacgtttgcaccataggctccggttttgcagttcaagatgttccgggcaacttttgcctgttccgtagaaggagaatacttttcaaggtatgccggataaaaacaccggaaaatatcctgaacggtgggcttattcataatcagcaccttctttcctgtcaaagggactttggattcccatgagggatttgttgctgacatgaagataaacttccgtggattttgggtcacggtgtccaagcagtgcctgaatattctgccgttctactccctgctccatcagatgagttgcaaagctatgacggagacagtgtggagttgctttctttggaagttcagcatcggatactgcccgtcgcatcacttgctccagtgtactgactgtcaggtaattaccagtaaatttattaggaaacaggatcccacggggacgtcctttctcaaaccagtattgtgtaaggatatccagacaccgtttagaaagaattgtatagcgatccatcctgttcttcgtatcccggacatggatctgcatatttgaacgggaaatatcatcataatgaaggtggatcacttcagaaacccgcatcccggaagaatacatcgttgcaaacatggctctatatttgatatcatcaacagcttctaatagacggtctatttcatcaacagtcagtacggtcggaagcttgtgttccagaatcatacgtggaactgtgatatcatcccaaaggatatgcaggacattccgatagaaaaaacggatagccgaattataaaggttcagagttgtggctcttagtccttcctcttttttggcaagcaaaaaatttctgacatcctggcaggtaagttcttcagggggcttcgcttgatatttcagaaagtaagaaacatagtttttatagcagttgatggaacgctctttgaggttacggatttttccggcttcctcaagctgttctaaatatttttcatacataataaaatcctccatgtaaaatcagtagtaatcaaaacactgctttacacggaggtgcatttgggtcataaaaccgcttgccaaccaagcggaagggtggtattcttttcataggcagtgggaaggtcgatcctgtttgattgttattttgtggtgatttaacaatactacttttaggacttgctttccactgttttttattatagaaaacagaaaatcgctatgccacagccttggcaggccatcgcgcagcgattttgttcaattagaagttgtggaggtgtagtaatgcacaaaactatattgattgaagaaattaccattgagaatgtaacagaaaaaataaatgaaaaagtacaagaaatggaaaaagacggttatcagattaaaaccatgtccttttggggaacagataaagctgtgttgattttcaaaaaagggctaaaaggaagtttgctataacttacagtttgacaatttcatatccatacacacaaagcagttagtcttaggattgactgcttttttcatacctaaatttcagattggagtgatgaaatgaacgatatttttaaggatatgcaggcaaatgtcggttgtgaatatctttctgaccttccctcttacaagcgtaaggtgtggcaggaaatgaaacgactgaaccctgccaattatgaagaaagacagttagaagatttttctaaatatgtgtttggtatgtcgtaccagaccttaaaagatgtgatgaaacaacagaaaggacgtgaggaacaatgcaggaaacaagggtgctggtggaaacgagaggaacaactggcgaagaaacaacatcatactggttcgacttgccgatagatgttgccgagtttgaagaaaagttaggtatcggtgcagaaagtggggattaccgcattatcgaaaaggggttgccttatgctgatgaagtccacgaacatacaagcgtgtatcagctcaacgaattagattttatgtaccgccagctttcaagtgatatgcaggaagaatatgtatcactacttacggtgtttgagaatttagaagcactttatatttgcaggaacgtgattacggtttatcccgactgcaaaagcatgatagatgttgcaaggcaaaagctgatgaacgacccgacgttcaaacatctgtccgaggactgtcaagaatactactttgactttgaagcctacgcttctcacttgcaggaacacgggaaatttttagtaacggaacacggtatctttgaactgccagagtaggaaatgaggtggtgcttatgattgatgatatggcggtttatattgctaatcttggtaaatacaatgagggttatttagtcggtgcttggttcacgtttcccattgacgaagaagatgtgaaagaaaaaatcggcttgaatgaacagtatgaggaatacgcaatccatgataccgacaacttccccattgcgattggcgagtatgtttccattgaagaactcaatgagatgtatgaaatgatagaggaacttcccgactatatcgtagagtgtctggacgaatttatcagccactttgggacgctggaagaagtcgtggaacacaaggacgatatttattattatcccgactgtgaaaccatgacagacgttgcctactactacatagacgaattgcaggcacttggggatattccacccagcttacagaactacattgactatgaagcctacgggcgagatttggatatgggcggttgctttattgaaacaagccgaggtatgtgcgagataccatattaacgctggaagatcagcgacaagcattgttgctactgacagcgtatttctcttttaagggacagtctgaaaatggctgtccttttctattttgaaaggagctgaaagaacttgaaaaagattaaaagctacacgggtatctggaacgtggaaaaagtcttgtatgcaatcaatgactttaacttaccctttcccgttacttttacacagattacatggtttgtgattacggaatttctcatcattctgtttggggatattcccccactttccatgattgagggagcatttctcaaatattttggtattcccgttgctctcacttggtttatgtcgcagaaaacttttgacggaaagaagccgtacagctttttgaaatcacagataacctatgccctgcgacctaaaatcacttatgcaggaaaagccgtaaaactgcataagcagaccttgaatgaaacaatcacggcagtaaggagtgtgaactatgttcccgataaaatatattgacaacaaccttgtctggaacaaggacaatgaagtgtttgcttattatgagctgataccgtataactattctttcttatccgcagagcagaaatttatcgtgcatgacagtttccgacagcttatcgcacagtcccgtgagggtaaaattcatgcgttgcagattgccacagaaagctccataagaagtatgcaggagcagtcaaagaaactggtaacgggaaaattaaaggaagttgcctatcagaagatagacgaacagaccgaagcgttagtatctatgattggggacaatcaagtggactaccgcttttttcttggctttaagctcatggttacggaagaacagcttaatctgaagaacatcaaaaaatcggcgtggctgacgttcacggaatttctccatgaagtgaaccacacgctgatgaatgattttgtttccatgccgaatgatgaaatcaaccgttacatgaaaatggaaaagttactggaaaataaaatctcccgtcgctttaaggtgcgtcgcttggaaatcaatgattttgggtatctcatggaacatctttacggcagggacggtatcgcctatgaagattatgagtaccagctaccaaagaaaaaattgaacaaagaaacgctgataaaatactacgaccttatctgtccgacaaggtgtgtgattgaagaaagccagcggtatttacgattggaacatgaggacaaggaaagctatgtgtcctattttaccgtcaatgcgattgtaggcgagcttgattttccgtcctctgaaatcttctatttccagcaacagcaatttacctttcccgttgatacttctatgaatgtagaaatcgtggagaaccgtaaagcattaacgaccgtccgcaacaagaaaaaggaattgaaagaccttgacaatcacgcttatcaagcaggaagtgaaaccagctcaaatgtggtggacgctttagacagcgtggacgagctggaaactgacttagaccagagcaaagaaagtatgtataagttaagctacgtgatacgggtgtctgcacccgatcttgacgagctgaaacgccgttgtgatgaagtcaaggacttttacgacgacctcaatgtaaagctggtgcgtcctgctggggatatgctggggcttcattctgaatttcttcctgccagcaagcgatatatcaatgactatgtgcagtatgtaaaatcagacttcttggctgggcttggttttggtgcgacacagcagttaggagaaactacgggtatctatatgggctattccgttgatacgggaagaaatgtgtacctgcaaccgtctttagcttcgcagggcgtaaaaggcacagttacaaatgcccttgcttctgcttttgtcggttcgcttggcggtgggaaatcgttctgcaacaatcttctggtgtattattcggttctctttgggggacaagcggttatcttagacccaaaatcagagcgtggcaactggaaagaaacacttccagaaatcgcccatgaaatcaatatcgtaaacctaaccagcgacaaggacaacgcaggacttcttgacccgtttgtgattatgaagaatgtaaaagacgctgaaagtctggcaatcgacatcttgacattccttactggtatttcctctagggacggcgaaaaattccccgtacttcgtaaggcagttcgttccgttacccagagcgacagtcggggcttgctccatgtgatagacgagctacgccgtgaagatacacccatatcaagaaatatcgcagaccatatcgacagtttcacggactacgattttgcacatctgctgttttcagatggtacggtggaaaatgctatcagtctggataaccagctcaatatcattcaagtagccgaccttgtactgccagataaagataccacttttgaggaatacacgaccattgaattattgtcggtgtctatgctgattgtgattagtacttttgcccttgattttatccattcggacagaagcatttttaagattgtcgatttggacgaagcgtgggcgttcttaaatgtggcacaaggcgaaaccttatcaaataagctggtgcgtgctggacgagctatgcaggcaggcgtttatttcgttacccagtctgcctatgacgtgtcaaaggaaagtctgaaaaacaatatcggcttaaagtttgcatttagaagcacggatataaacgagataaagcagaccttagagtttttcggtatcgacaaggacgatgagaacaaccagaaacgcttgcgtgatttggaaaacggacaatgcttattgcaggacttatacgggcgtgtcggtgtggtgcagatacacccagtctttgaagaactgctacacgcctttgataccagaccgcccgtacagagaaatgaggtggagtgatgaaagaaaggataaaaggtgcgttcacaaaaaagaagatacttcacgttctcaaaatggctctgtttgtcgtggcactctcccttatcctgctttcacttctggggacggtggctcatgcgacggggcttgtggacgataccataaacgcagaaaatctttactctaaatatccgctgtcgaattaccagcttgatttttatgtggataatagctggtcgtggttgccgtggaactggctggacgggattggaaaatcggtacagtacgggctttactgcattaccaactttgtctggacgataagcctttacttatctaatgcaacgggctatgtggtgcaggaagcctataagctggacttcatcaatgacatggcagacagtatcgggcagagcatacaaacccttgcaggcgttaccgaaaatggtttttcttccacgggcttttatgttggtttcctgcttcttattatcttagtggtaggaatgtatgttgcctatacgggactgataaaaagagaaaccagcaaggcacttcacgctgttatcaactttgtggtggtgttcgtgctgtccgcttcctttattgcctatgctcccgactacatcaagaagataaatgaattttcaagcgacatcagtaccgcttcacttgacttaggaacaaaaattatgctccccaactctgacagcgagggcaaggacagcgtggacttgatacgggacagcttattttctattcaagtggaacagccgtggctcttacttcaatttggcaacagcaacgcagaagaaatcgggacagaccgtgtagaagctctcgtatcagcaagcccagaggacgaggacggaaagaccagagaggaagtcgtgaaaacagaaatcgaggacaacgacaacaacaatctgacgataccgcaggtggtaaaccgtttgggtatggtgttcttcctcttgttcttcaatttagggataacgatatttgtattcttgcttacgggcatgatgttatttagccagatactttttattatctttgcaatgtttttacctatcagctttctactttccatgataccgagctatgagagcatggcaaagcaggcaatcgtaagggtgtttaataccataatgacacgggcaggaataacgctcattgtaacggtggcgttcagcatttccagtatgttttataacatatccacggactatccgtttttcatggtggcgttcttgcagatagtatgtttcgctggtatctatatgaagctgggcgatttaatgagtatgttctctttgaacgctaatgacagtcaaagcatgggacgcaggatattccgcagaccatatctatatttggcacacagggctaggcgtatggaaagacggcttgctggtgcggttacggctggcggcgtggctggtgcggtggcaggtagcacgatttcaaacagaaaaccgacaaggaacacagctacaaaagacagtcggggcaataccacttccagcatgggacagcgtgcaggctcaaaggtgggggctgtcttagatacgaaaaataaagtaaaagacaaggcaaatgctgtcaaagaaaacatcaaggatatgccgacacagaccgcttatgcggtgtattccgcaaaggaaaaggcaaagtccagcgtgtccgactttaagcgtggcatggtgcaggaacagcagtccagacagacgggacgattggaaaagcaggaacagcatagacagaatattgctgataagcgtatggagcttcaaaaggcacaagaagcaaggcaggcacagcgaaaggctgacggatcagcgacaacgggagctacccgtccccatgagcgaccagccacagcttcaaccattccaaagccgagtgctgaaaaaatgcaggaagtcaaacgtcctgccacagcgaccacttcaaaagcaagtgagccagtcaagacaactgttatcaaagagcgtccgttatcttctggtgcttctgatagaaaagcgacccagcctgcacagacagtacataggcagaatgtagaaaaagtggtatcgcaggaaacacgccagaattacaccaaagaccgcaggacaacggttcagcagacgcaaaccgtccaaaagaaccagcagacaacagagaaaactcgtaaccttgtgatgaagaaaggacagaagaaaaatgaaactgaaacatatcgctctcattggcactctgtttcctatcctcttttctctggtgcttttctttggtgtgttgattagtgcggacagcgacgacgagaacagcaatttttcttctggcattacgggtatgaatttatccgcagaagtcttgaaacatcagcctatggtagaaaaatacgccagagaatacggtatctccgagtatgtcaatgtgctattggctatcattcaagtagaaagtggcggtacggcagaagatgttatgcagagttcggaaagtcttggtttaccgcctaattctttagatacggaaagttcaatcaagcaggggtgtaagtattttgcgtccctgctttcttcctgcaaaaatcaaggtatcgacgatttgaatgtagcgatacagtcttataactatggcggtggttatgtgggatatgtggcaggaaaaggaaagaaacacacctttaaccttgcagagagcttcgcccgtgagaaatcgggtggaaagaaagtaacctataccaacccgatagccgttgcgaagaatgggggctggcggtatggctatggaaatatgttctatgtggaattagtcaatcaatatctgaccgtggcacattttgataatgcgacggcacaagcgattatgaatgaagcattgaaatatcaaggctggaaatatgtgtatggtggcagtaacccgaacacttcctttgattgtagcggacttgtgcaatggtgctatggaaaagctggtatctccttaccgagaaccgcacaagcacagtatgacgctacccaacatcttccgctttcgcaggcaaaggctggggatttggtatttttccattctacctataacgctggaagttatgtaacccacgtcggtattcttgtttcgccgacacagatgtaccatgcaggcgacccgataggatatgcagacctaagcagtagttactggcaacagcacttaatcggtgcaggacgagtaaaacaatagaaaggacttgaaaaatatgtttaagaagaatgagaaacagacagaaaatgtcaaagaaaaaaaggtgcgtaccgttaaagtaggcacacataagaaaaccgtgattgcattgtgggcggtgcttatcgcaagcgtgagctttggagtatataagaattttaccgctatcgaccagcacacgacccatgaaaaagaaatcatagagcttcgcttgcaggacaccaacgggatagaaaatttcgtaaaaaactttgcgaagtcctactacacatggagtaacagcaaagaagcgattgaagcaaggacgcaggcaatcagcggttatctgacaaaagaattgcaggacttgaatatagataccattagaaccgatataccgaccagctccacggttacagatgtgattgtatggagtatcgaacagtcgggaacggacactttttctgctacctacgaagtagatcagcagataaaagagggagaacagacaagcaatgtgaaagcaacctataccgtaaaagtccatgtggacgctgacggggatatggtaatcgttcagaaccctacccttgcccctgcaatcgaaaaatcagactatgagccaaagacaccagaagcagacgcaagtatagacgctgataccgtcaatgacgctaccgcatttttggaaacattctttaagctgtacccgacagctacggaaaaagagcttgcttactatgtaactggaaatgtgcttgaacctatcggcagggactacctttattctgaactggtaaacccagtatttacaaaggacggggacaatgtgaaagttaaggtagctgtaaaattccttgataatcagacaaaggcgacgcaggtatcgcagtatgagcttgtgctacataaggatagtaactggaagattataaaataatagctctattataccccctcctcaatatgtgtcatgctagcttgacatttgaagttaatatgatataatgataatgtaaggctaacttgacatttaaaaggaggggtgattttgaaaaaccgtgtaaaagagttgcgtgaaaaggagggactaacgcaaaagaaattaggcgaaaaagtaaatgtttcaagacaagcaatcaacgctattgaaacgggaaaatatgacccatcactttggttggcttatgatattgcacaactatttaatatgagcattgaagaagtattcaattttaaggagagtgagagaaaatgaaatcattaaaaaatcctatgactaatgcgatttatatagcttcaattactgctatttacgctatgatatttatagtttcgtctgaatttgtatcaaagtatgcttattggctttctgatagtcggtggtctttgttcattcaaaacaaaaacatgaaatttataggacttgggatgattggcatagcaattatcattgacatattctctgctttaagaagaaagaaatatgatgagtatcaaataattgcattagaaaaagtcatgctatttaatggactttttataacgattatctttccattttctttatttatacttatttttgcaccgatatattttgtggaaacgatttttgcttttattctatttcaatggttgtgtatggtaattacagaagtgctttatttatttaagaattataaaatttaagtggaaggagttgttactatgtggtttgtttggggtatgtggggaatagttaccatttctattattgcaacaattattttgatgacaggaaagggaagtaagtttgttactggttttaatactaaaagtacagaagaaagagcacaatatgactcaaaaaaagtgagtaaacaagcaggaatttttatgattttaatagatgtaggattgattgcacttgtttcgtatattcagtttagagccgttccagctattcaaaataacacaatttcaaattatggaacagaaataactattgtttcattaggaatttgtgcttatataattcttgttgcaatgatagcggttattcgtggctttaagtatagtaagaaataatgaggttagaatgataacctcaagttcctatgtaattattaaagaaatttactacaaataatttgtttgaggtattggtatgataagacttaaaaaacgagatataaaaaaaggcattaaaagctggtgcaaaagctggcggtgtatcattggctgatgttcgagctgatattgaagcaacgattgatgaagcaatgcacagtaccgaccctgatgtgcaggcaaatttcagaaagtattttgggaatagacgccctacgccagaagaatatatttataagattacgaaaaagacaaagttttaattacataaatgaataaaaatttttgattagaaaagaggtgtgaaagtgaaagaaagcagattgtttagaattttgtattatctattacaacacaaaaaagctactgctccagagttagcagaagagtttgaagtatctgtaaggacaatatatagagatatagattatatcagcagtgctggcgttcctatttatgctacacaagggaaagacggtggtattgcaattcttgatagttttactttggataaatcaatgcttactgaaatagaaaaagaacaaattttaactgctttagaagctctaattgccacggacggaaaaactactgatgaattgttaataaaactaaaaactttatttcaaatgcaaacaacaaattggattgaagttgatttttcagattggtttcaagaaaaaccagcccaaaacatattcaatgatataaaaaaagcgatattagatagatatgttatatcttttgaatattttaatcatcatggaaatcatgtatttcgacatattcagccacttaaattactatttaagggaaaagcatggtatgtgtatggcttttgcttattaagaaatgagtatcggttttttaaacttacaagaataaggaaccttaatattactgaaaaaaagtttttaccaaaggaaagtattgctacgcttgatacaacaataaagaaagaaaagactgttgaagtaactttgaaatttaataagcacatggcgtttcgtgtatatgatgaatttgcaagtgaaaatattatagatatgaatgattatttatatgtaacaacattattaccgaacaatgatactctttattcgtatgtgctttcttttgaagattatgtagagattgttaagccacacgagataagggagaacatgaagtgccgactaaaaaaaattcaagaaaaatatataacatgacaaacggtgtcaagtttcgttttgtctaatcttcttacattaagataaggagaattgaatatgaaacatgaatggaaaaaatatgaaaaaaatttatacggagtgaaacaatctccacgcatagtagatattcctatgcaacagtttattatgattgagggaaaaggaaacccgaacgacaaagatttttcagataaggtatccgctttatattctttagcttatggtatcaaaatgatgtacaaaaatactattagttctaatgaggttagcgattatactgtatatcccttagaagcaatttggaaagatataggtaatacagaccagctcgataagaaccagctagaatataccattatgatacgacaacccgattttattacaaaagatatgtttttcaacgcattagaacgagtgaaaattaaaaaacctaatgaactatataaacaaattcttttcgatacaatgcaggacgcaaaaagtatagaaattcttcatatagggacttatgatgatgaacctatatcttttcaaaagatggacttgcttgccaaagaaaatgatttagtgcgttcaacgaattatcatagagagatttacttgaataatgctaatcgtgttctgaaaagtaagttaaaaacgattttacgttattgtgttaaataaagagaaatgcggtaagggggcttggattatggaaagttttaagcataattctatacggtcaatcgtaagtaagtaatcatccgtatctgttttttcattttttattctgctacaatctccttaaaactcaggaggtattctatacactatgaacaaagaagaaaaagcaaaactctgggctgaccgtatccaacaatacaaaaccagtggacaaacgtgtaaacaatggtgtgcagaaaacgatatccctttatctacgatgggatactggacccgcagacttgctaaagaagatccggcatctgaacctgaacaggatctggtctttgccagactgccatctgaacaggaagctgccagaaagcttctctctgaagaaactgcaccggtgcgtatttttgtctcagacagtatccgtattgaaatatctgattcctgcagaccggaactgatggaatccatactgggattcctgcagtgccatgcttgacttggcaggaggaacaacggtatatcttgcctgcggagtcactgatctgagaaaaagttacaatggtctggctgccatcatcaaattaaaatttcacctcgacccatactcacgctgcatgtttgcgttctgcaaccgtcggcgtacttctataaagatcctccaatgggacggatccggattctggatcctgatgaaacggctcgaccgtaatgccttccactggccggatactccggacgaactccgccaggtgactctgaaggagatccactggctgtgtgacggactatccttaaatcccagaggtgcatttgaggaacaccatccaaagatcattctgtaagcatacgacagcggagctgtcaatcccgtaaaaatcatgaaaaatacgacatcttcctgcatatttcctatatccggaaacgcagttttccataggaaaacagctgggatcatggtatacttttgataatgataaaagccgggaggacaggacatggaaccgatctttacagataaacagctgaataacatgagccgtgaagatctgatctcattgatgaagatcgtacaggaacagacaaagaagaaggatacggagatccagctgctgaaggataaacagaaggaactcgaattcttaaatgccatgctctctgaccgtcttacccttgcacagaggaaacagtttggtgcatccagcgaaaagtatgccgaaggctatgaacagatgaacctgttcaatgaggcagaagccagtgcggatgcggaaacagaagagctgtttgaagagatccggccatcctcttataaacgtaaaaagagaaaaggaaagaaggaagaagatctttccaattttgagactgttgagaccaggacctataaactggaaggggaagcccgttactgcccggaatgcggaaaaaaatacagcgtagtaacaaaggaaaccgtaaaacgcctgcgttttgtacctgcaaagtttgaggttgaagaagagatcacttatgtatacagctgtccaaaatgcggggccatgaaacgtccggaaaaagaaccttccctgatccgtggaagtatcgctacgccttcccttgtcgccggtatcatgaacgctaaatatgtaaatgggatgcctctggcacgccaggaaagagagtttgccagatatgatcttgatctttccacaaagactatggcaaactggatcataaactgtgcagacagatacctgaaaccactgtatcagctgatgaaagaagaacttctggaaagcagatatatccattgtgatgaaagccgtatccaggtacttggagaaccagagcagaaaggtacgacccagaactggatgtgggtatacctcacggatgagttcagtggctccccgcagatggtactcttcgattatgaaaggacccgtgcgggatatcatcctgtaaactttttagggaacaggtttcatgggtatctgacctgtgatggatatcaggcttatcacagtttaggagaaggtatcataataagcggatgccttacccatgcaagacggcgctttgatgcagccctcacagcattgaaaaaagacttcacaaaagaacagctgaaagagacagttgcatatcaggcaatgtcaaggatcgggattctctataagattgaggagatgctccatgacaaaacaccggaagaaaaatatgaggagcgccagaaacagtcccgtccggttatggatgccatgtttgaatggctgcatacgatggaagattctgtagacaggtcttcccttattggtgatgccattttgtatacgcttaatcaggaagtatatctgagacggtatctggaagatggtcatctcagcatagacaacaacagtgcagaacgtgcattgaaaaactttgcagtaggacgccgcaactggctgtttgccaaaagtgtacggggagcagatgccagtgcccttgtttacagcattacagaaacagcacttctgaaccatctgaaaccatacgcatatctgacttatatattggatgaactcagaaaaatgggggcttttcctaaagaggaagaattaaagaaactgcttccatggtcagagaatcttccggaatactgccgtactaaactaaaaaaataataataagccatctgatagagaatctggcagacagccaggagcagtatcagatggcttttataaaatgtcaatatacgaatgattacctacttactgacaattcacatatgattgatttgatccgtttgcacgacgttcgatttcagctttgacggtttccttccatggagccagaagttctaattcatcatcactcattctatcatcaggtagtttttccagcagataagtaagatagtgatagacgtttacgccattggcttttgccatctctaccattgtgtacacgatagcgctggcctgggctccgtttggtgtgtcacagaacagccagtttttacggcctactgtaaacggacggatcgcattttcactgagattattagaaaaactgcagcgcccgtcttcgagataggtagtcagataggagcggcggttctgaatgtaggtgacagctttatccattctgcttccacgggtagggttctgctgatcaagccacgacaaaaagccttctactaccggcttttctttttcaaggcgagccttttttatagcatcgaaggaagaatactttgatctgatcacatcttccagatggaagagctggttaatgtacagcattccctgtacagatggctgggtataatccagtgcttttcccttagggatggcatctgtcagatatcttctgatgtgtgcccagcaggctgtgcgtttggcatccggtactttattgtatccgctatagccatcacacatcagataacccttgaagccgtgaagaaaatctacggcattgtccccggcccgggtctccgagtatttatagaggataataggtggtcctccgtcttcaccgctgcggaacagccacatatatgacttggtttgcgcgcggcgttccggttcatgcagaacctgaagtggcgtttcatctgccatcgcgaatccacgttccagaagtttcctgtggaagtattcgtacataggaagaaaaaatgcttcagaattccggatcacccagtttgccatagtagctctggtgatctccacgccatactgtttccagtccttttcctgacggtagtatggaagaccattacaaaacttctggtacattacccaggcaaccgttccggcagaagccattccataaagcatatgggatctgccatcttttccttttttgataaccggtatatcctgaagcctgcactgcgggcactcatagctcttactgtagtattcatatactttcagttttgccggtacaaaaaccagctcccggcggacaaactcttccccgatttctttcagtggggtaccacaggcagggcagagtttctcttcctcagaaagttccagatactttttctcaacaggaactcccttaaaccgttcagcatctgtagctcttgcttttcgtttttttgctgttttttccggaagaagtgcctcaagatcctctgcttttacagcttctggatcctgttccagttccgcttcattgaaaaagtttaactggcctggaatatcgatggttcttttttcactggaggtgccaaacagttttttacggagaaggtctatctcttctttcaggttatcccgttcctgggtaagagcctcttcccgtttattggcagcatcgacagttgcctgaagtgtttttatcatctttttgagatcgtttatcatgtccttcagctcacggagctggatatctttggaactgtctgccactgctttttcctcctgtttctgatgtttccattataccagaaaacagtggcttttcccagcaaaacagcggatttaccagaccttgaaagtgccgaaaatacagcaaaaaacaagagttttatgtgcatcttttgtaagtaggtaatcattcgtatattgacattttataaaagccatctgatactgctcctggctgtctgccagattctctatcagatggcttattattatttttttagtttagtacggcagtattccggaagattctctgaccatggaagcagtttctttaattcttcctctttaggaaaagcccccatttttctgagttcatccaatatataagtcagatatgcgtatggtttcagatggttcagaagtgctgtttctgtaatgctgtaaacaagggcactggcatctgctccccgtacacttttggcaaacagccagttgcggcgtcctactgcaaagtttttcaatgcacgttctgcactgttgttgtctatgctgagatgaccatcttccagataccgtctcagatatacttcctgattaagcgtatacaaaatggcatcaccaataagggaagacctgtctacagaatcttccatcgtatgcagccattcaaacatggcatccataaccggacgggactgtttctggcgctcctcatatttttcttccggtgttttgtcatggagcatctcctcaatcttatagagaatcccgatccttgacattgcctgatatgcaactgtctctttcagctgttcttttgtgaagtcttttttcaatgctgtgagggctgcatcaaagcgccgtcttgcatgggtaaggcatccgcttattatgataccttctcctaaactgtgataagcctgatatccatcacaggtcagatacccatgaaacctgttccctaaaaagtttacaggatgatatcccgcacgggtcctttcataatcgaagagtaccatctgcggggagccactgaactcatccgtgaggtatacccacatccagttctgggtcgtacctttctgctctggttctccaagtacctggatacggctttcatcacaatggatatatctgctttccagaagttcttctttcatcagctgatacagtggtttcaggtatctgtctgcacagtttatgatccagtttgccatagtctttgtggaaagatcaagatcatatctggcaaactctctttcctggcgtgccagaggcatcccatttacatatttagcgttcatgataccggcgacaagggaaggcgtagcgatacttccacggatcagggaaggttctttttccggacgtttcatggccccgcattttggacagctgtatacataagtgatctcttcttcaacctcaaactttgcaggtacaaaacgcaggcgttttacggtttcctttgttactacgctgtatttttttccgcattccgggcagtaacgggcttccccttccagtttataggtcctggtctcaacagtctcaaaattggaaagatcttcttccttctttccttttctctttttacgtttataagaggatggccggatctcttcaaacagctcttctgtttccgcatccgcactggcttctgcctcattgaacaggttcatctgttcatagccttcggcatacttttcgctggatgcaccaaactgtttcctctgtgcaagggtaagacggtcagagagcatggcatttaagaattcgagttccttctgtttatccttcagcagctggatctccgtatccttcttctttgtctgttcctgtacgatcttcatcaatgagatcagatcttcacggctcatgttattcagctgtttatctgtaaagatcggttccatgtcctgtcctcccggcttttatcattatcaaaagtataccatgatcccagctgttttcctatggaaaactgcgtttccggatataggaaatatgcaggaagatgtcgtatttttcatgatttttacgggattgacagctccgctgtcgtatgcttacagaatgatctttggatggtgttcctcaaatgcacctctgggatttaaggatagtccgtcacacagccagtggatctctttcagagtcacctggcggagttcgtccggagtatccggccagtggaaggcattacggtcgagccgtttcatcaggatccagaatccggatccgtcccattggaggatctttatagaagtacgccgacggttgcagaacgcaaacatgcagcgtgagtatgggtcgaggtgaaattttaatttgatgatggcagccagaccattgtaactttttctcagatcagtgactccgcaggcaagatataccgttgttcctcctgccaagtcaagcatggcactgcaggaatcccagtatggattccatcagttccggtctgcaggaatcagatatttcaatacggatactgtctgagacaaaaatacgcaccggtgcagtttcttcagagagaagctttctggcagcttcctgttcggatggcagtctggcaaagaccagatcctgttcaggttcagatgccggatcttctttagcaagtctgcgggtccagtatcccatcgtagataaagggatatcgttttctgcacaccattgtttacacgtttgtccactggttttgtattgttggatacggtcagcccagagttttgctttttcttctttgttcatagtgtatagaatacctcctgagttttaaggagattgtagcagaataaaaaatgaaaaaacagatacggatgattacttacttaccatcttttttacgttgccttgatcgcttttggctgctcaatatcaatgccagacatcagccagtcgaactcccgccatgtaagattccggacctcagatttattcctgggccaccggtaagatccctgggcggtcagtcttttgtagatcataacgatcccgtcaggttcttttaaaatagctttgatacggtcgcatttacgaccgcagaaaagaaaaagtgcatggtcgatctccatcgaaaactgttcctggatgatcgcacataatccatcaatggacttgcgcatatctgttctgccacagacgatatagatcgcatcaacacttgagatgtccgctaacataatgactccttcagcgtatccataagcatcttcagaagtaccggtttgatctcattactcattcgtataagcaatccgtctgcttcgatttcaatcgtatgtgaattgtcaaggtgcataggactgtttccattatctggaatcagtcctgccggagaatactccggttctatagcaatctggactacatcctgtttatgggacgtaaggtcaagagtgctggcttttccaactggatccggtatctgacaggcttttttgcggagacgggtaactgcattgtaaaaacagctgggagatatcccatgttcattacaccatgcagcatctgtcaggccactttgtctgcattcggtgaccagttccatccattcgtccagggaacgtcctggagcacgtttattactcataatgaaacctccaaatatagtaaatttctatctcctatcaagcggagtgtagtaaaaatctatttgctatcattatgagttcaaaaacgtagacagtaaagctacccaagatttaagcacttacgatttaaatacactgcggcctctggcgatgaaccggaagccgctatatttttaatcttttttataaaatttggtctcgtagccgtcacctcggatcagtatgtccggcatccaggcaggagactgtcccatgatggaggtaatgctgctgacatctgtgtcctccgggcattcgatgataagctcatcatggacatggccgcagatctgttgatcggaaagattctgcatagcgtagcacagtagatctctggatacggcctgtacgatattttccacaaacttcggaccgtaggattctatgcgttcccatttcttggtggaaccgatgccctcgtaggtgacggattcaccgccgaatctgttttcaccaatctttggcttcacatagctgagtactctgccggaagggagcttgattaagagcattccgcttttgtaacagaaatgaattccatttacttcagtagggatgcgcatcttgatggcggtctttactgcattatctacattccaccagaaagctgtaatcataggattggaattacgccaggaatctacgagtggttggagctcttcttcgctaagccccatttctaaagctcccatggatttcagagcgcctacagatccgccgtatccgagggcaagctctgcgattttgcccttctgtctgaggtgagaatttatgccatgcttttcaaccggaactccaaacatctgactggcagaagcacagtagatgtctttgccttcagcgaatacttttgaacgccaggtctcaccggcaagatgtgcaaggaccctggcttcgatggcagagtagtcacttacgatgaatttatatccaggtcttacgatgaaggctgtacggatcagttggcttaaagtatcaggaatgtcatcataaagcatatccagagtatcataatcaccagtacgaaccagctcacgagcttcagctaagtcggacatatgattttgcggaaggttctgcagctggatcaagcgaccagcccatcttcctgagcggttggccccatagaactggaacataccgtgagctctgccgtctttgcaaacagcattctgcattgcctggtatttctttacagaggatttggcaagctggagtctcagcttaagcgctttactgatatcgccatcggtctctttaataagaccagcaacatcctttttactaagggattctgtttcgacaccgttatcagagagccattgtttcatctgaaccacgctgtttggattatccaggttagtgatatttttcattgccatcataagagctgatttggatcttgtatcgaaggcaatagcattttctacaacatccatatccagcattatgcccctgtcgttgatttcctgatcaatatgatattcatgccacactgagtcaggtaccggaaattttgataatctctgcttgatggcaagctccacctcaacatccccgcgattataggtcttaaaggtttcccatttatcaggtgcatgttcagggaggtttctggttcttccgccatttacctttgttggcttacagggactgcagaagtatttgattaagtccttgccttctttcattttctggttctggagcttaaggacagacccgacaccttcaagtgaaagcggtaagcccatataggcggaccatatcattgtacatttccatgaggctggattcaagaagtcttgtaccggatcgccttgagtattataagttttgaagtatttcgggtgatgcttcctgagccagttggataagcagaccctttcaaaggaagcattgaaagcccatttggttacattttcatcagatagtgctgctaagatttctgctggaatctcatcacctgatgtaaggtcatagacagcaacaggcccattatcaacagagacaccaaagagcagtatctcaaaattatcagactcagcgtacttgtatgctccgcatttggagatatcaatatcgctgtaagtttctaaatcaattgacaattctttcatcataaatccttcctttgcaaaaatggcagcggcactttgtgggtaccgccgcctgtgtattagtttttatcagtatcttcggtcttaggctggaaccattaataattcttttgtcataggttgtcaccatacctttcttcgaattggcagcaggtttgtcctaccgccgtaattgtcgtgtgatttttagttgagaaaatcgtcctcatcatcagttgcgaaatcatcttctgcacgagacttgccgccgagtggttcgccgtcacgaatcttctggagattgttgagtccacaggcaattcctttgtttccattgctgttgaaggcataaaggttaatgctggctctgccgtatacgccggaatacacttcggatctctcaaggataggctgacgatctgcatctacgatgccaggtgctgtagcgctgttggcgttaatgaagtatgcgtctgcgtaagccggatcatcaggtctctccagatcaccatcgcggagaggtgttttgagtacggagatagcaggaacggttttgccattgcctttgagcttgctctgaccttcttcataagcggctgcgattgcggctttgatcttgtttacggttacagtgtcggatttgggaatgatgagggaaacgctgtacttaggtgcgcctccgttaatgctcttggcatcccatacattcgcatagctccaacgtgtgtttactcctgtgattacctttgtaggattagaaatctttgacataattgttgtctcctttactctttaaaatcatcttttgcagtgttcattgccggtctcttatctgattccggtaccaatgtgggtttgccaggtggtttgtaaattagcccacctaaaagctcttcgaatttcttctttccgagcagtgtgctcatggctgttattccgagaagctttttctcatacggatcgaagcctgcgtcttttactgtatctgccacagcattttcgtcggtatattttcttttggatcttccttctacaattttccagccttcgaagtgaacgcctgattgtgcctgttgcagtgcatagtctttgatgtcgttgccccatgaaatcatttcatttactttttcgaggatggcagcgatttctgtatcatccagtgtggcaggcatctcgaaatcatattttgcaagctccagattgtattctgcacgcttgcggcaggttgcctttactttgcagaaggtacaatggtcgccggcgttgaattcgcctttgccgacgtatgcaagctgtgcagttggcgccaggacttcgtctgcccatttcagcagatttttcttgctgatggtgtaggtgctgatgttgtcgcgtcttggctggaagatggtcatcttaatctggttgatgtcgtagatgtcaccgaatacttctaaagctcctaaagcatagcacatcatctggctgttgccgccatgctcatcgtcaccggcacttacgaggattccgaggccgtgcttgtaatcgatgatttgcaatacttcatcggctacgatgacacagtcgccggttccgaagccattttctacccagcgggagaaatccagtctctgttcgatcatgacctgcggatccttgcagaattcttttgctgcttcaatctgctctaatacgtaatttctgtattcctcagcacagttttgcatttcggcatcgtagtaggtgagattttccgttggatcgattacatctttgccaagtgctttttctaccagataagcacaaagctcatggcaatcggttccctgctgtgcatattcggaagcctgatccaggatgttggcacagagctttgcgcttggtggacaggctaaccatctgtggctggcagaagcggaaaggtatgcgtgcttaggcatttccaatcacctctgcttccttaagaagggctgcgtaatctttcggatcaatctgctttaactgctgagctccgaatttttccagaaggtcttttacctccttcttaaagcctgcagctgattttgcagcgagtactccgcgaacatcttcctttgtataggtaggagcgggctcggtctttgccgaagcttcttctgtagaagagaagatatcctttaatgcattggcggttttgatcattccttcaccacaggcaatcatttcatccagcacctgagataattcactcattttgctcattttcagttcctccgttttctttattctgttgtcttagattggctgccagtcgttttgctacaacgctgattgcaatgagagtatcaatgagctcttcctcaatctgtggtgtggcctgctggcttttatcaatcgtttctgtctgcatctgcagcacctcgctttccgaagggctttgttgcctttctatcttcctaagcgcatccggggagtgtttttccggtcggagggaatattttttgaataaagttttgaaaatagccagggcaaatttcgctttatataaggaagcgatgttgctctgggtgatttttgcaaattattttggaatctgaccggaaaagtgtagggcaaacccgcttaggaagttaggagaacttgtaggttcttacttttacagaagcgaggtttgaaatatgcaggtaactatttgtacagcaaactgcgtcggtcaagccgggaactgtagctatcccaatagggtgacagtggttacgccggagcagctgcaggaagcggtgaagaaggatcatgtttgtgcagagttcaaagggaattatcgaagcgttgagaatttcatcagatcagatgtgattgtcatggatattgataatgaccacacggacgaacctacagaatggattacgcctgagaagttggaagagctgtttccgaatgtggaatacttgctggcaccgagccgccaccatcttttagataaggaaggcaagtcggcgagaccgaggtatcacatgtattttcctatttcagagataacggatgccggcaggtacgcaaatctgaagaaagcaattcagagtgtttattccttctttgatggaaatgcgctggatgctgccagattcatattcggtgcggaatgtgatgaggtgatttatcacgatggttggatgacggtggatgaagaggtagatacctctgatatcgaagaagagtattttgattctgagatgtcaggtggtaagagtaccggtcctatcttagaaggaagccgtaataacaccatgagccgatttgcgggacgtattcttaagaagtatggtgatacagagaaggctcatgaagcttttttggagcatgcaagaaaatgtgatccgccgcttccagatgctgagcttaagactatttggaacagtgcagtgaagttttacaggaagagtattgtgacacaggacggatatgtaccgccggaggaatataatgcagatttcgaaggtgccactttgaagcctgaggattattccgatatcggacaggcgaaggttcttgtgagtgagtatggcgaagagctgaagtacaccagtgcaacagatttccttagatttgatggtgactgttggcgtgaggataagcagttggcaatcggcgcggttgaggaattcttggatctgcagcttcaggatgcaatggatgaggttgccagagtagaaaaggcattagaggatgccggagtgacaaaggcttctatacaggcaggtccgagggagcttctgaaggaagtggacggtcagctgttaccgcttgtttatatgcttatgggtgcgcagacatatctgaagtttgtgcagaaaagacgtgattataagtacattgtttcagcggcgaatactgcgaagccaatgattgcaatttcggtcagtgatctggataaggatgagaatctcatcaatacgccttatgccacctttgatttaaggaagggactggcagaagaacagcctcatgatcctggggatttgattactaagattacggcatgttcgccgggtgaagaaggaaagcagatatggttggatgctttgaagcttttcttttgcaaggatcagaagctcatcgattatgtgcaggagacagttggtatggctgcaatcggtaaggtttatcaggagcatatgattattgcttacggtggcggtgccaatggtaagagtaccttctggaatacgatttttcgggtgcttggtaattacgcaggtaagctttcagcagaagcgctcactatgaactgtaagagaaatgtgaagccggagatggctgagcttaagggtaagagactcatcatttcttcggagatggaggaaggtatgaggcttaatacggcagttgtgaagcagctttgctctacagatgagatccaggctgagaagaagtacaaggatccgttttcttttgttccgtcgcatacgctggtgctttatacaaaccatcttccgaaggttggagctaatgatgatggtatttggcgaaggctgatcgtgattccttttaatgcgaagattactggtaagagtgacattaagaattatgcagattaccttttcgaacatgctgggcctgccattatgagttggattatcgaaggtgccaagaaggctatcgacaaggatttccatacagaccttccggatgtggtggaggcggcgattaaggcttaccgcgaggataatgattggcttggtcagtttttagaggagtgttgtgagatggatccgtcatataaagaaaaatcgggagagctgtatcaggcttatcgggcgcattgcatgcagaatggcgaatatatccgcagtactacagatttctattcttcgatggataaagctggttttaaccgtatccgcaagaatacgggagtgcaggtcgtgggattgaagcttaaagaaggacaggattttttaaattaattctttttgtgtaggtcgttaacctctctacataaaaatccctttagagagaatttataaaaaatctgctatagggagttttacggaacgaggtactcgacctgcacacctgttaagaatgatggaggcgtacgatgcgtgaaaaatatattgaacagaaattagttcgagaagtaaagaagcgaggtggcttgtgtgaaaaatggaattccggttcttcaggctggcccgaccgaattgttttattacctgatgggaaaatcgggttcgtggaggtgaaggctcccggtgagaagccaagaaagcttcaggtgcatagacatgaacagcttcgtgctcttggttataaagtattcgtcctggatgatatgggacagattggaggaattatagatgcaatacaaaccgcatgattatcagcagtatgcaatcaattatatattggaacatccgatagcagccgtaatacttgggatgggacttggcaagaccagtattacgttgacagccatcgagcagcttatgtatgacagctttgagataaacaaggtcctggtggtggctccgcttcgagtagcaagaaacacctggagtgatgagattcacaaatgggagcatttgaagcatctgaaatattcgatcgttctaggtacagcagcagatcggaagaaggctctggcagcagatgcagatatttatgtaattaatcgtgaaaatctgcaatggctggttgagcagagtggtgtttcttttgattttgatatggtggttctggatgagctttcatcctttaagaactggaacagcaaacgttttaaggcttttatgaaggtgagaccaaaggtaaagagagtaatcggtctcaccggtacaccttcttctaatgggttgatggatctctttgcagaattcaagtgcctggatatgggagagagacttggcagatttatcagtcagtacagagtgaattatttcgtgccagatcagactaatggccagattgtttattcttacagattaagaaaaggtgccgaggaacagatttataacaagatatcggatatcacgatttctatgaaggcacttgaccatttgaaaatgccggagcttatcagtaatgaatatccggtttatatgagtgagcatgaagcttctttatatgatgacatggaagcagaaatgttccttccacttagaaccggtgagattactgcagctaatgcggcggctctttcaggaaagctgttacagatggcaaatggtgctgtttattctgatgacggcgatgagattcagatccacgatcaaaagttagatgcgctggaggatttgatagaagctgctaacgggaagccggtgatggtggcttattggtttaagcatgacctgacaagaattaggaggaggctttcagagaggaagatttcttttgaaaagctggattctgaggaaagtatacgtaaatggaatagaggagaactgccggtggctctgattcatcctgcatcagcagggcatggtctcaatctgcagtcaggcggaaatatcttaatctggtttggacttacctggagcctggaactgtatcagcagacagtggccagattgtggaggcagggacagtcggctgagactgttgtggtccagcatattattactgcaggaacgatagatgaagatgtcatgaaagcattggccaataaggatatgacacaaaacagattgattgctgctgtaaaagcgagggtaacgcatggtaggtaagaatttagcagaagatccatatgaacatcttgccaatgctattattcttagtgcggtttctgattatagagccgcactcaaaagggtaaagtgtaatcagggaagcaagacagcaatggatgaggctttgcggatagagaaattcttcagaagtccgtggtatcagcaactgacttcagtggatggagagtttttgataagaaggcttcaggatgaaataagacaatcagagtaaatccgagggaaatttttattttatcggaggtagcatatgacagcaaaagagtatttgaagcaggcgtatcttttggataagcagatacaagttgaggttaaggaactggaacagcttcgggagatgcgtggcaccattcagggatgcagctatggggaaaagattggtacgaatcctaacataaatctggaggctccatttattaaaaccattgagaagatatgggagtatgagaagaagattgatggtaagattaatagattggtagatcttcgctcagaaatcaatacagcgattgaaaagatggagaattcagaggaaaggcttcttcttaaatatcgttatcttaaaaatgaaagctgggaagatatttcctatgagctgaatgtttcttatagaacagtacatcgtatccatgcatcagcattaaataattttgtcgtatcggaataaggttggcacaccttgtcacaacgtggcagaagcatatatgttattatgatagtgtcgaaagtgtatgacagaacagagccttgagagaagaaattttcccggggcttttttgcatgagtaatgaggaaagtagctgccatgcttgcatgagcagacatttgacgaatgtcgcgacaatgagaaaacttgtttcgagtgcatggaaggaagtgtaactgtgcctagcaagccgaagaaaccgtgtgcttatccaggctgtcctgcgttagtgacagggcggtactgtgcagagcatgcgaaaaaagtgaatagtgattatgagaaatacggaagagataaaaatgcgaagagaagatatggtcgtgcatggaaaaggattcgtgataagtatgctgcagggcatccgttctgtgagaagtgctacgagcgaggagttctggttccagtggaggagattcaccacaagcttcctttgagtgaaggcggcacacatgaccggagcaatctgattgcgttgtgtaagtcgtgtcattcacagattcatgcgaagcgtggggatcgttggcatgaccggtaggggggatcaaaatctctgtagaccggctcaccatagaacggcgggtaggtcttgcgtgtgcagtcgcaaaattgaataggggggatagcagaaaaaagccacctcccaaaggaagtggtactattgtgaaatatcggattttgcttctgtattatctgaaggatcagtagttttgtcttctggccttgtttgagctgataagcgatccaatagaatatcagtggtgttagaaggaatatgtattcgttctttcttcatcagtgttcgagctttttgatttgtttcataatcgcgatcacctttttcgaaaatggagcaacaaagaaaatcacattttaattcaccttgcgcatttgccttgatgataaagatgaaattatcaacactaaaatggctggatattaaataatctgctttaatgcctgtgatgaaaggatacatgcgtggcatgtatgaatataaattaactcattgtgctacttaaaatacgactgcttatcgactcaaaattgcccagattacccctatataattgaaagcacttttttagaagatgagatgttttatctgtccaatatcacattgttctccaaatacactgttgaatgccatgcacaggttgtgccccagaattttattctgtaatcgggtacataatccatgaaagctttttgcgagaactttttccgcatttaactgttcgctaagctgcgaaaatacagtttccaccctacgacggaagcggaagatcagctgccgtatttcttttggccagttgttcttatgattagatggtttgagagacatcaggcagatacctttttcacgcatatcctgcaaaaggttttccccagtatagcctttatctccaaatattgtaacccgcagatggttttctgcaaggtcgcgcagtccttcccggtcatccacagatgcgggcgtaatctcaaaagcagttacataaccttctatggtaataagggcatgtactttgaacccgaaataagtttcctttttggatggacattttccataatttgcgccatcctcgcggaaggaacggcagtaacgcgcacgcccaaatttgcagactggaagagggaagctgtcaattacaaaataacggctgtcaggtattgggaaggattgagccagtttctgccggagcagttccgttacttgtaaaagagctcttctggttcggttaaatcgcgtgcggcagcatagatgcggaaaaaggtgtcgataattacgtttcacgaaagaataccatgccttttcagaatctataccaatgagttcaccacaaatgcttagcgtaattatttcagaatcagacatctttgcagtatgcacattccgcctttgggaaacgcatacagggacagaccgttgatacaaatcatcaataactgtataaacaagcaaaataaaatcttcaaaagttgctgtgagagtggtataatcatctttgaacttcaacattatgtgtgcctcctttcatagcatgtagtggtgtacagctataggataacatattttgttgaagttttttatattaactagcacaatgggttaaattaaatttgttatcaagggattctttcaagtgaactaaagcttcaagtcgaggttttatcatctcctcgtactgggctgctttttgaactttttcaaatagtattttaccctcaagaattctatcagcagttttggcagaagaataattgggaagagagatatctttcatatactggaagccagctaaatgcggataatcttccagagaaaaggtgagattaattggatacagctgtttcttatagccatatgtaaacaaatatctatattcagttatttctttccaggcttgtgcagactgttgtaatagatccatattataccttgtcctttgcaaaaaataaaggaccctgccaatgcaaggcccttaaaaagcgttttcattcagttccgaagaacctattcggtttgaggttatcgcataacccaaggtcaggctccacaaccggctgcataccgacacagtcgattgcttcaacaccacgatagctggtcaacgccgctatcctctaacttcattatatcacaaaaatactcgtagtcaacagaaaacgagtttttgaggaacactatttgcttcgtgttcttaattattatatgtagaaataatggttttgacaatagaaaatattggaacttgagaaaggagggattccgatggcgggaagaaagccaaagcctacagctgtgaagaaactggaaggtaatccaggtaagagaaaactgaatacgaaggagccgattccggcaaagggaatgcctgtctatcctgactggttaatgccggaagcgaagaaggaatgggaacgcttggcgaagttgatgaatcagatgggtgttcttactgaagttgatatggcggcatttgctgcatattgtcagtcatatgcaagatggaaggaggctcaggagcatattacttctggcggctcgacatttgaaacggataaaggatatcagcagcagacaccttgggttggaattgcaaatacgaatcagaagttgatgttgcaggcagcgtcggaatttgggcttacgccatcttcgcggagcaggattgtggccggtaatggtaaagtgaaggaaactgaggatgagatggaggcattacttggggatagtggtgtgtttggatagacagttggtaaaaatcaaggaggtgtgatgggcgatggcgcgtgaaacaagaccaaaagactatccaaagctgaaaaattatcagccgacaaggtttatgcttccgacttctcattatgataagcaaaaggcggacagggcagtaacctttattgagaatctttgtcataccaaaggtaagtgggcaggcaagagattctggctattaccctggcaggagcagctaataagagatatattcgggattgtcaagcctgatgggaacagacaattccgtacagcttttgtagaaatctgtaaaaaggttggaaagagtgaattggcagcagctattgctctttatttactttatgcagataatgaaccatctgcggaggtttatggtgcagcggcggaccggcagcaggcatccattgtttttgatgttgcaagacagatggttgagatgtcaccggcactgatgaagagaagcaagctgatgtcagctaccaagcgaattgtcaattacggaaatgccggtttttatcaggtgctttcagcagaagttggaagtaaacatggtttttcgatttcgggacttgtgttcgatgaaattcatatacagccgaatcgtcagttatatgatgttttgacgaagtacagttcagatgcccggcagaatccactgcactttattattacgactgctggaaatgacaggcattcgattgcgtttgaactgcataccaaagcagtagatattctggaaggacggcgtgtagatccgactttttatcctgtagtttacggattaaaggatgatgaggactgggaagatgaaacaaactggtacaaggtaaatccttccctgggatatacggtggatattgagagacttcgtgatgcttacagggaagcaaaacagaatccggctgatgagattacttttaagtggcttcgtatgaatatgtgggtatccagtacgacgtcatggattccggatgcaatctttatgaaaggcagtgagccaattgatatgagattgctagagggaagagactgttatgcaggattggatctttccagtacaggagatattacagcactggttctgatatttccgccgagaaattcggatgaaaaacatattctggtgccgtacttttgggtgccggaagaaaccataccacagagggtgaaggcgaattcagttccttatgatgtatgggagaagcagggacatctgctggcaacggaaggaaatgtgatccactatgatttcattgagaaattcatctgtgatcttggggagaagtaccatatcctggaaattgcggtggacagatggaatgcaacacagatgatccagaacctggagggtacaggatttacgatggtaccttttggccagggatttgcaagtatgagtacaccgacgaaggagttttacagacttctgatggaaggacagattattcatgccgggcatccggttcttcggtggatggcgggtaatgttgtgatcgagacagatgctgcggagaatattaaggtgacgaaggcaaagtctaaggagaagattgatggaattgtagcttctattatggctctggatcggtgtattaggaatcagggagaaacgcagggcagtgtgtatgatgagagaggactgctggtgttttgagaatgaagagtatgcagcaggagttctggcaggaaaggttataatgtggagattgtgtgcaggagttttcagaagaaatggctgtgatgcaaagagttcagtttgtttgaaacgggtgaatgtgatgattggtgttttggtatttgcaggtattggatttctgattctgttcggagtgtgtctgtgtttattgagggcaggatctgaagcggatgacagagtttgtatgatgcagaagaaagatgatgagaaaaattccgaaaatattaagaaagatattgactctgacgctatgtaatagcttatgctatgattaccacagggaaagaggtgatcaaagatgatgacagtacatgaggtcagtaagatatcgggagtgagcatacgtgccatgcatcattatgataagattggacttctgccggccacggaagttaccagtgcaggataccggctgtatgacgatacggcattggaaaggcttcagcatattttgctgttcaaggaattggaattttcactgaaagagattaaggatattctggacagtccggattttgacagggataaggctctggaacagcagattcatctgctggaacttcggaaagaacacatagaaaatctgattgatcttgcccgtggaataaagatgatcggagtgaaagagatgagttttgaggcttttgatacaagaaagattgatgagtatgcagaacaggcaaaggcatcctgggggaaaacagatgcctataaggaatatgaacaaaaggcggcgggacggagtatagaagaacagcattcaatcaatgccaggttgatggggatttttgctgaatttggaaaaatcagaaatcaggatccggaaagtgcggaagcgaacttgctaagaaactgcaggattttattacggagcatttttataaatgtacagatgaaattctgatggggcttggctctatgtacgcaggcggcggggagtttacaattaatattgataaagtcgggggagaaggaaccgcagtgtttgcagacaaagcgatccgggtattgtgcaggaaataaattacattaggaatggcatctatcgtaatgataggtgcttttcttatgctcttttttgaaaggatgatgaaaatgaggttgtttgggaagctgtttcggggaaggaatgctccttctaacagcacaactggaagcggatatggattttttatggggagtacggcttccgggaagagggtgaatgcacggagtgccatgcagatgactgcagtgtattcgtgtgtgaggattctttctgaggcggtggcgggtctgccgctgcagttttacaggtataacgataatggcggtaaggaaaaggcggtggatcatccgctttattttttgctgcatgatgagccgaatccggagatgacttcttttgtatttagggagactttgatgacgcatttgcttttgtggggaaatgcgtacagtcagataatccggaacgggaaaggtgagatcgtggcactttatccgctgatgcctgaccggatgacggtggacagggatgagcatggcaggctttattatgagtacctggtgtatgacggtgatgatgtggatggcagaaccgggacggatccgaaagcaaatggaaagatcgtgcgtctgcatccggcggatgtgctgcatattccggggcttgggtttgacgggctggtcggatattcacctattgccatggcgaagaatgcgatcgggcttgccattgctgcggaggagtatggaagcaagttttatgccaacggtgccgctccgtcaggagtgctggagcatccggggactttgaaggatccgggcagggtgcgggagagctggcagtccactttcgggggaagcggcaatgcaaataaggttgctgtcctggaagagggaatgaagtatacgccgatttccattgcaccgaatgaagcacagtttctggaaacaaggaagtttcagattgatgagattgccaggattttcagggtgccgccgcatatggtcggggatctggacaagtccagtttcagcaacattgagcagcagtccctggagtttgtgaagtatacactggatccctgggtgagccgttgggaacaggcaatggtcagggctttgctgtctgcggaggaaaagaagaagtatttctttaagttcaacgtggacgggctgctcaggggagattatcagtcaaggatgaccggttatgctacggcaaggcagaacggatggatgagtgccaatgacatccgggaactggaaaatatggaccggatcccagaagagcttggcggtgatctgtatctgatcaatggaaatatgacgcttctggggtccccacggagttatgaaactccggggggagaggaggagcatcggaatggatgagcttcactgcctgcagggaagcgaagaaaatggagattgtgacgacgaaggatgccggactgtttggcggagccggtggaaaggagaagggagccagtgaagaagttttggaactggaagaaaacaaaaacggtgaatcaggaaacaggacaggaaacggaagaacggatcctgttcatgaacggagttattgctgaggacagctggtttgacgatgatgtcacgccggctctttttaaggatgagctgaatgccggaacaggggatattaccctgtggatcaacagtccaggcggggactgtgttgcggcggcacagatttttaatatgctgtcggagtatccggggaaggttacggtgaagattgacgggcttgcagcatctgctgcgtctgttattgcaatggccggaactgaggtatggatgagtccggtgagcatgatgatgatccataatccggccacggttgcatggggcgaccatgcagagatgaagaaggctatggaacttctggatgccgtgagggaatccatcatcaatgcttatgtacggaaaacgggacagagcagggcgaagctgtcacatctgatggatgcggaaacgtggatggatgcaaataaagctgtggagtttgggtttgtggatgacattctgttccagaaagaggaacagggcagtgaaggcgaaaatggagattcaggtgctgaccgtacagaaaacgggacgtctgattctgtaatgttttccagacgggcagtaaataatgcattgatgaataagctggagagacattatggaaagactgggaaatctgtgaaagatcagacagagatcacaaggatggctgctggtggtaatggattatcggggcagtgttacggaaattcttctggtatgcagggaattggaataagtggaagtgccggtactgagggggacgatccatgtaatggatgtttcggggcggcagagaatgcctgccagaagtgtgaaaagaagaaagtgaatacgaatgttacagggcgttctgcggatgatctgcgtgaacgcttaaattttattaaaaaatatatctgaggaggatacggattatgacgattcaggaattgatggagaagagagctaaggtttgggaagctgcaaagaattttgtggatgcccatgagaatgaaaatggtgttctgtctgcggaggacagtgcaacctatgagaggatggaagcggagattgaggatctgacaaaggcgattgaccgccaccgcaaggcagaggaaatggaaaagaacctgaaccagccggtaaaccagccgctgaccgggaagccttatgcaggcggccagggggagccaaagacaggacgtgcttctgatgaataccgcagggcaatgctgaatgcactgagaagcaacttccgccaggtttccaatacccttcaggagggcgtggatgccgacggcggttatctggttccggaagagtatgacagaagactgattgatgttctgaatgaagagaatatcatgcgccgtcttgccacaagaatcgtgacttccggggaacataagatcaatattgcggccaccaagccggcggcaagctggattgaggaaggcggggcgctgactttcggggatgcgacttttgaccagaagatcctggatgcacataagcttcatgtggcgattaaggtaacggaggaactgctttatgacaatgcctttaatctggaaaattacattattgtccagtttggaaaagcacttgccaatgcggaagaggatgctttcctgaacggaaacggaacagggaaaccgaccggtatttttgacggaacaggcggagggcatctgctgaatacactggctgtagctttgaaatcagatgacatgctggatctggtgtatggcctgaaacgtccgtaccgtaaaaatgcatcctttatcatgaatgatgcaacactgccttcccttagaaagctgaaggacaataacggtgcttatatctggcagccggcttaccaggcaggggaaccggacagaatcctgggatataaggtggagacttctgcctatgcaccgaaggacggcatcgcttttggggattacagctattacaacattggggaccgtggaaacagatcctttaagcagctgaatgaactgtttgcaggcaacggaatgatcggttttgttgcaaaggaacgtgtggacggaaaactggttcttccggaagccgtgcagatcatgaaactgaaagctgactaatgtgaaggaatgacaggggatggtgtaagccgtcccctgctttgatcgaatcagggaaggtttcaagtttgaaaaacaacaagcagtggtggagcgttcgctggtttgaaaatcagatcagccaggcggcgagcacgaagaatgatgaacgaaatggaaacaggaaaatctgcgggaggtgacgggatgtcctgggtggttcatgaggatatgaagattgagatgacaaagggggatacgccttcttttgcgttccaggcatttctgccggacggatcggagtatgagtttgaggaaggcgattccgtagtatttgcggcgaagcggaataaggcggatccggagccagcggtacggatcgaggctgatgtgaaggagaaggtgatcagattctcagaggaagatacaaaacatctggaactgggaaaatatatctgggagctgtccttaaacaagagcagcggttaccggtgtacatttattgcaaataagattttgaaactgacggtggaggtggcgtgatggagcagctgacgggaaccatgagcagtgttcctaattcaaataattatgaaaatatgagccataagccgcagatcaatggtgtggagctgaccggaaataaaacttcggaagaactggggcttggcggcggtgaagtgaccaggaaggaactggaagatgccttaaggaataaggtggataaggaaactgggaaaggactttccagtaatgattttgggaacagtgaaaaatccaagctggaggggattgaggaaggcgcacagaagaatgtgccggtaccgtcaaaggtaagtgaattggaaaatgacagtaaattccagaccgaggaacaggtacaggagataaggaagacggtggaggaactgggcaggcggatggatgaactgacggatggaaatgaggtggcgtactgatggcaaatgtgcttgtaaatgagaaaacactgaaagctattgcagatgcggtgcgtgcccagggtggtacttctgccctgatgaaaccaggagagatcccggatgcagtgagcaggatcccgtcaggcggaagtgctgcggatatgtccctgccggtccggttctttgattatgatggaaccctgctgtacagcttttcccttgaggagcttgcagggctggaacgactgccggatcttccgtttcacgaaggattggtctgtaagggctggaactggtcgctggaggatctgaaagcaacaaaccgggaaatgaatgtagctgcccagtatgttacggatgacggggccacaaggttttatgtgacgctggatgaagatatgctggagtcgcaggtttcttttggtcagagtttcagtaacggtgtgaaggtggactggggtgatggaagtgaactggaaacagcagaaggatggaattataacaggattaccctgacacaccggtaccagaaagcaggggagtatgtgcttcggtttctgccacaggaagacaatatggttatgtttatgggaagttacagcgaggggtcttatgtttttacagcaggaaagaaaagtaaagaggaaaacatgaagtatctgtcagcagtgaggaaaattgaagtgggaaggaatgtgaaagaactggcttcctattgtttctgctgcttttcaagactggagacggtcacactggaaaaaacagacggtctgtttggaaatgggattgtaaagtgctgttatggcctgaaatttttgggaattccggacaatctggaatcaattccaagatatttgtgcgagcagtgcataagcctgaaaaatgtatctgttccgaacggaatagtcacaatccctgataatgcattttcggaatgtcattctctggaaaagatcactatgccggagacagtcacatcgcttggaaaatttgccctgaatgagtgtctggccatgaaagaactgtatcttccagagaaagtatctgctattgagggcagcatattcagaaaagactggcttctggaaggaatccggcttacagatggcataacggaaattccggacaatgctttttcaggatgtcatatgctgacagaactggtaattcctgcggctgtgacggcaatcaccaagtatgcatttgagaactgtaaaggaatgaaacggtattattttcttccggttttaccgccgaagctttccggggcaactgtattcaatgggattccggaggattgtaagatctatgtgccgaaaggaagcctggaggcttatcagacggcggacagctggagtaattttgcttcctatatggtggaaatggaaggtgatgttccgtgatcgtgacagtaaaggaaatgaagaattacctgcgggtggattttgacgatgatgatgtgctgctttctgatctgatcgagcaggggcagcagatctgcatggacgtggcaaggattacggatgaggatgagtttgaagatctgcaggggacgaagattgccgtgcagtatgcggctgcctatctgtatgaacacagggaggacgcggatcaccatcagctggtgatggatctgcggagcctgctgttcggagtgagaaaaccgggattctgagaaaatatccgtgaaatggaaatgaaaaccggatgcaggaaatggttctggtgaatattgttatgaaggatggaattggtgggtgtcatggatgttggattgatgaatgaaaaggtgatttttcagaagtgttctgttgtgaaggacgggatcggaaatcacaggaatgagtggacagaggattactgctgttttgctacgataggcggtgaggggcttgccagttccagggaagcggaaaccgcagggactgtggtggaggatgtgggaatgactgtgacggtgcggtactgtaaaaagactgcaggcatccggtctgttacccacaggatcctgtttcgtgatcaggtgtatgacattgtgagtgtggatcatctgaattataagaagaagtgtctgaaattcacatgcaggaaggtccggaggtgagagcatggcaggtgacagatgtacagtcagccagatggcagatgtgatcatggaaggactggaagagtatgcacagcttgctgcggatgatatgaaaaaagcggtaaagaaggcagggacacaggcaaggaaggatatccaggagaatgcccctgtgaagaccggtgcctatgcaaagagctgggcggcgaagaccacgaaggaaactgccaatgcaatggagatcgtggtgtattccaggaacaggtaccagctggcacatctgctggagttcggtcatgcgctgagaaaaggcggcaggacaagggcgtttccccatattgcgcctgctgaggaaagggctgcacagactctggaacgggaagtggagaaggcactggggtgatggcaggaggtgaaagcatatgacactggaagaactggcagggatgctggaagagacgggatttccttttgcctatgaccattttgcggaaggggaaagcccggatccgccgtttatctgttatctgcttccaggaagtgataattttgcggcagacgggcgggtatatttccggatcagtgaagtaagaatagagctttacacggaccggaaggatcccgtggcagaagctctggtggaaacagttctggatgatgccgggattttttataataagtcggaggtctggatccagagcgaaaagctgtatgaggtgctgtacagtatggaactgtaatgatttgtttagtgatggagcttcctgtataataaaaaatgtggatgttgaaaattgaaaatacctcagagtacaataagactactgactggcaggttagtaaaaatcttattgaacagagaggtatctacaatgaagtctaacacacagaataaaaaaatagaagcaataactgaaaaaactttggtaatcggaatcgatgtaggaagtgaaacacattatgcaagggcgtttgactacagaggcattgagtattcaaagaaaccatttaagtttagtaacacagaggccggatttgtgacatttaaggaatggatcctggacctcaaagaaaaacatgagaaggataaggtggttccaggcatggaaccgacagggcactactggtttaatcttggaaagtatcttcaggataatgaaatgaaaccagtacttgtgaatccacatcatgtcaagaaatcaaaggaactcgacgacaataatccaactaagaatgatcgtaaggatccgaaagtgattgcaggtctggttagagagggacgatacatgatcccatatctgccggatggtgtttatgctgatctcagaacagcatcaaacataagattccagttacagtcggaacttacaagaatccaaaacaggatcagtcgttggttcaatatatattttcctgaatataagacggtatacggaaagccggatgccaagagcggaatgctgatccttaaggaggcaccactcccggaagatatcctgacgttgggtatcgatggagtggaccagatctggcgggatgcaaagatgagagcagttggaaaggcgagggcgaagaccctgatcgaagctgcggagcacagcgtcggaagcaaagaaggagcagtatctgcaagaatggagatccggatgcttcttgaggactatgaatccagaaatatgcgtctacaggaagttatggttctaattgaagaactggtaaaacagattccgatggctgaaaagctgctggaaatcaaaggtgtgggaatcaagacagtgtccggattccttgcagaagtaggtgatatcagtcgcttcaacagtccgaaagaactgcagaagcttgcaggattggcattggttgagaacagttccggaaagcacaagggagagacaacaataagcagacgaggtcgaaagagactcagatacctgctctttgaggttgcaatgtcgcttgtagcgaagaacccggagttcagggaactacataattattacacaaccagaaggctgaatccattgaagaaaatgcagtcacttatggcgattgcagccaagctgatacgagtcttttttgcgatgctgactaaaggtgtggattatgatccgaaaaaaatggtcagtgacatcaagagaccggcagtttatctacaggctgcataagaaagacaagtaactataatggaggctgtcacgtggacagccactgaattaagcagaatgtaacagataacgtccactgatcacagtgctggaacaggaagcgagtcagtaatcaataatacaaagaatgagccagtagtcggcaggaatattttccatagggcatgaccctgtaatggagcatagctgacaccctggttatgggcaggcaggacgaaggaagttaggacctctggagacagagatgatcctggtggatataggaggttagctgccatagagggatgggtatatacaaggccagtaaaacggaaatcaatgacgttttatttcgtataccctctaaccactatttcagtacctgatacatcgaaatgctcatagctgtggcttattcactgagatatgaaaggttgaaaaaccttgaattttcaatagaaaacacttgattatatgaggaggaatattatgtctgataagaataacaaggtgaagtataacctgaaaaatgcgcattacgctttactgacggtcggggaggacggggcggtgtcctatgcagcgccggtgccgcttcctggctctgtatcactgtccctggatgccaacggggaaccggagaatttttatgcggatggtattgcgtactatgtaatcaacaacaatatgggctatgacggggatctggagcttgcactgattccagagagtttcaggacggatgtgctgagagaaaagctggatgccaagggcgttctgattgagaattcggatgcagaactggcactgtttgccctgctttttgagttcgacggggatgtgcgccatatccgccacgtgatgtataactgttcggcttcacgtccgaagattgagggcaagaccaacgaggagaagaaggaagtgcagacggaaacactgactatcaaggccacaccattgtcggatggaaagataaaggcaaagacagggaatactacggatgcaactgtttatgcagactggtacaaggcggtgtatctgccggctgcggatccggcttccttgcaggcagctgatggtggaaagtctgttgtggatgctacaggaaatggaaaagcactgagctgagggggattcggatatgagcatgatgaagaagattgagattgacgggaaggcggttgcttttaaggcatctgccgccattccgcgtatttacaggattaaatttcagagggatatctacaaggatttatctgttctggaaaagagtattggggacggggatccggaaaagtcttccctggatctgttttcccttgagatgttcgagaacattgcgtatgtgatggcgaagcatgcggatccgtcgattccggataatccggaggaatggctggatgagtttaatacattcagtatttaccaggttctgccgaagctgatcgagctgtggggaatgaatatcaggacggatgtggaggctaaaaaaaacttcatgcaacagaccgtgaaatgacaactcccctgtttcttctccggtgtgtgcagctggggatttccatccgggatctggatctgctgactatcgggatggtgaacgatatgtttgtggagagcaggaacgatgagtataagggatggagacaggttgccacacaggaggatttcgacaggttctgatctgatgaaatgtggtgacaggatgattcagaaagggtataatgggtttatcaaatcaatatttactgaattaagttaatcgtgccatatggcttgattataaatacaaagataaaaacgcaatgtacattaaaaatgtattagagctggtaggtagcccagccgtcctatgtaaatagggtaagtaacctgcccctccgggttgtccattctttgttcattttattttaggagggattcttatggacaaagtaaatggaaaactgacggtatattttgaagaaccattttgggtaggcgtatttgagcgtattgaagatggtaaactatctgtggcgaaggcaacatttggtgcagaaccaaaagattacgaagtacaggaatatattcaaaaatactatttcagtttgaaattcagtccggctgttgaaactattgtaaaggatatcaaaagaaatccgaaacggatgcagcgagaagcaaaaaagcagatgctggaaaccggcattggtacaaaatcgcagcaggcattgaaattacagcaggaacagaacaaacaggagcataaagagagaagccgcaagaaaaaagaggcggaagaacagcgaatgtttgaattgaaacagcaaaagaaaagagaaaagcataagggacattaaagtcccttgggcttttcctcaaatcggaagttaaggagggcatttatatgaaattagcagatttagctacgggtccagactggataatatggactgtctttgtggtatttgctgtactttctataattttactttctgggcacggaagttggtttatttctggatacaatatggcttcaaaagaagaaaaggaaaagtatgatgaaaagaagttatgcagaacaacgggaattggaatgtctattatagcaattcttatattaattatgggtttgtttgaaaactttctttctgcattttttatatatattgcagtgggaatcattatggttgatgtcgtggtgattatcattttgggaaacacgctatgcagaaagtaacaacttaagtttaaggaggtagttatggcttttgattttaagaaggaatataaagagttttatatgcctaaaaataaaccagcgattgtaacagtcccaaaagcaaattatattgcagtcagaggaaagggtaatccaaacgaagaaggcggggcatatcagcaggcaattagtgtattatatgcggttgcatatactttgagaatgagttacaagacagattataaaattgcaggattttttgaatatgtagttccaccacttgaaggattctggtggcaggaaaatatacatggtgtaaattatgcagataaagattcatttaattggatttcagttatccgcctgcctgattttgtgaatcaaaaagattttgaatgggctgttgaaacagcagctaaaaagaaaaaaatagactgttcatcggcagagtttttgactattgatgagggattgtgtgttcaaataatgcacttgggggcatttgatgatgaacctgcaactgttgcacttatggatgcttatttggagcggaatggatatgttaatgatatgaatatggaaagattacatcatgaaatatatctgtctgatgcaagaaaggttgccccagaaaaatggaaaacggtcattaggcatcctataaagaaattgtaaacttccagttttgttgataaaaaaatgaagacgataatgaaagcatttgtcagggatggcaggtgctttttttatgcccggagtgatccgggtatttttgtgccttttttatgggatttagggggtgagccgtatggcagggaacagaattaaagggatcactgtcgagattggcggcgataccacgaaattgcagactgccctgaaaggggttaatacggaaattaggaatacgcagagccagctgaaagatgtggagaagcttctgaagctggatccggggaatacggagctgatcgcgcagaagcacaggctgctggcacaggcggtttctgaaacaagggaaaagttggagactttgaagactgcacagcagcaggcggatgaggcactgcggaacgggacgatttcccaggaccagtatgatgccctgcagagggagattgttgagacggagcagagactgcggagtctggaagagcaggcgaaccagtctgcgactgcgctgcagaagatcggggcaaccggtgagaagctgcagacggttggaaacaagatttcttccgtgggacagaagctacttccggtgacgggagtggtgacagggcttggaacggcggcgttgaaaactgccgctgattttgactctgcgatgagcagggtggcagctgtgtccggggcaacgggttctgattttgacagcctccgggataaggccagggaaatgggagcaaaaacgaagttttctgcgactgaggcggcggatgccatgaactacatggctatggccggatggaagacggaggatatgctgtctggtattgaaggcgttatgtatttggctgcggcatccggggaagaccttgcaacgacttctgatattgtgacggatgcgctgacagcttttgggctgactgcagcggactcgggacattttgcggatgtgctggcggcggcttcaagtaatgccaataccaatgtgtccatgatgggcgaaacgttcaagtactgtgcgccggttgcgggggcactgggattttcagttgaggatacggcagaagcaatcgggctgatggggaatgccggtatcaaggcttcccaggctggtacttccatgcgttccatcatgacgaacctgaccggggatgtgaagctgtctggtgtagcgatcggggacgtgaccattgccacaactaatgcggatggttccatgaggagcctgtctgcgatcctggctgactgcaggggagcttttgcaggaatgacggaagctgagaaggcgaacaatgcggaggctctggttggaaagaatgccatgtcaggtttcctggcattgatgaatgcggcaccggaggatattgaaaaggtgtccggggcagtgaataactgtaaggatgcggcaaagaacatggcggataccatgcaggataatctggaaggacagctgaccattttgaagtcacagcttcaggagctggcgatctctttcggggatctgctgatgcctgcggtgcggagtattgtttccggactgcaggggatggtggacgtgctgaatgccatgccggacggggtgaaacgtgtgatcatgatcgttgcacttctggctgcggctctgggtcctgtgctgatcatcataggcaagaccctttcggccattggaacgatcatgacatgggcaccgaagcttgccggtgcgatcagcgcagtgaagggtgcttttgcggcactgagtgccacgatgatggcaaatccgatcgccattgtgattgctgccattgcagctttagtggcggcgtttatttatctctggaatacaaatgaggagttccggcagttctggatcaggctgtggaatgagattaaggaagtcgctgtccaggtatggacggcggtttcccagtttctggtttctgcatggaacgggatccggaatacggcggtggctgtatggaatggcatccgggatttcttttccggtctgtgggctgggattaagacactgttcacaacggttgtcactgcaatttctactttccttgtgggagcgtggaatggtatccggcaacagttatggcggtgtggaatgcgatttcagcatttctgggttctgtctggaatggtattaagtctgttattacgaatgtggtgaacgggatccggacgtttttgcagagtgcatggaacgggatccgcacagtcattactacggtgatgaatgcgatccggacggtgatctctacggtctggaatggtatccgcacaattatttctaccgtgctgaatggaatcagaggtactgtcaattccgtgtggaatgggatcaggaatacgatttcttctgtggtaaacgggattaagaatacggtttccagtgcttttaatgccatgtggtccggaatccggagtacgatttccggaatttataatacgatccgggacggactgggaaatgcggtgaattatattacaggtcttgcatctgccggatggcggtggggtgcggatatcatcaatggcattgtaaatggtatccggagctgtattggtgcagttgccaatgcggtgacggatgtggcaaatactattcgttcccatctgcatttctctgtgccggatgaagggcctctgacggattttgagagctggatgcctgactttatgaatggtctggccgagggcattgagaagagcaggggaatggtgaaggcggctgtgaacagtgtagctgcggatatggtggtttcgccgcagatggctgtgacagacggcggggtgatgattggcgcaggagtgtctggtagtgcggatctgacagccggtattgtggcggcgctgaaggatgtgctgggtgatcagaaaggacagcagggggatctggtgattccggtttatctggggaaccagctgctggatgaggtgatcgtgacggcacagcagagaatgagtctgaggagcggaggtagataggatggctttttttcagtatcttgtgtttgacggggagaacctgccgcttctggattcttatgaggtggagctggaggatgtggaagcggattccggcggtgagacggaggcagggacgacacagagggatgtggtgagacatggtgttgcacggatcccggtgtcgttttctgttacggcgaagtggttgaagaagctggcagggtatgcgaaactggataagatcagcgtgcagtattttgatgtggagacagcggagctgaaactgacagagatgtatgtgacggggtataaagcgaagctgaaaaaggataccagttataaggggctttggacggttagttttacgttgaaggagatgtaaagatatgaggtgactgaggagagtgaagctgttataatgaagtcatgaaaacgaaatcaggaggatattttgatggggaaaaatgacagatttgaaagaatttattcacagggaaccatgaatgttacggaaatctgggtcgacagggaaactggggtaaactatgtgtttcatgcggctgcgaatgcaggaggaatgactccgctgcttgacagagagggcaaaccggtggtttctccgataatgaatagataattcagaatctatggagatgggttatatgaaaaacatatgcgaattaaaacattttgcaaattttaaagcaagcggattgtcacttctgacagaaaatttgcacacatttcttaattgcaaggtgttgatgcagttgacacctgtgaaaaattttgaaaaatatttcggcttagatatacataccaatatcaatagaaattgctacaagatatctgaaaaaaagatagcattaataattaagatttttggaaaagaacatggaagtattgatgcagtcgttccaatagtattattcggagaaaatattacaagcattgaaaattcattatttgaaattttatcaaatcttttatcaaaaagaatgacagaatgcaagaataattcattttatggaggacttagattttttggagatgattttataagagaagctatttcaaaatgtttagcaccaaagcaatatgatttttcaaggataatgtttttggttgaattatttgaaaaactagcttcgatgacttttgaaggcgattattttacaacgggccttattttatctaaatcgttatacgaatatggtgaaaaaaacggaaaagatagaaaagggaaattgagaaaaataaataagcattatgacatagttagaaaaccatcaatagaaaaaaggttttggtatctcattgatggatttagttctttttatttaatggatcagacatttgtgattaaacaaacttttacaagaaacgaaaaaaaatctaagttaacagactattttgattcctattttcttgacaatacactaatgggtggagatatcgcctttagagttattgggccaaatgaagtctcgattattactaaaaaaggatacgagtttataaaaattgagagcaaatggagaattagaaatttttcatggttaaatacttatttggaaagtaacataaagttagatatcgagataacaagagctgtaatatactatgtgacattatgttcgcaaagacattgtagctctatcatatggatcccgaagaatgaaacggagagtgaaatagataaagttatttcagcgaaaaacaaaatatggaaagacgatttgaatttagtagatgaaatgaataaatctataattcaaaggattatgtcaagtgatggagttactattatcagtaaagaaggtaaaataatctattgcggagctatagtaaaacttgatgtaaaaaaagaaggtggattgatgggaacaggagaaaatgcagcaaaaatattagggcaaaacggagtggcatttaaaatatctcaggatggaaatataaaaatttttacgaattcattaactgatcccactatttattaatgctgataaacatttcagtttgtaggtgagaaaaatgagattaaaaaatattctgattgtagtgaaagatattgaaaaatcaaagcagttttatcatgatttgtttggtcttgagttggtgcttgataatgatggaaatatgatcctgactgaagggcttgtgcttcaggatgaaaagatatggaaggattttttgggaaaggagattatcccgcagaataattcctgtgaactgtattttgaagaacgcaatatagaggcatttgtggaaaagctgtagaaactgtatccgtcagtaaattatgccaataggcttatgacgcacagctggggacagaaggtagtccgcttttatgatccggatggaaatctgattgaggtgggaacgcctgcgtagtgtgtgtttatgattaaaaatgtgaaagcatcggtcactgaaatggctggtgcttttttcgtggggaaatggaggtggcgggatgtatcctgtgtcggatgcttttctgagggctgtcaggagtaatacaaggaaatatttctggacgggtacgatcgttaccaagggcggaatgacgtatgagttcggggcgaaggagatcgtgaagggttccgggtatatttccaggcagtgctgcggaagtacggagattgaactggggacggtgtatgcggcggagatggggatcacgcttctgagtgatattgacaggtacacgctggaggatgctcaggtgacgctggtgtttcatctggtgctggcggatggttctgtggaagatgtgccgatgggagtttttgaggtcagtgaggcaaaccggctggcaaagtgcctggaactgaaagcctatgattttatgctgcggtttgataagagtttcaacgggtttgagactgtggggattgcttatgattttattgctctgtgctgtaagagatgcaaggtggagtttgcgaataagagggcggagattgatgccatgccgaatggcggggtgacgctttctgtttatactgaaaatgatattgagacctgccgggatgtgctgttttatgtggcacaggttctgggaggtttctttattatcaatagggaggggaagctggaactgagaaagtacgggaaggatcctgtgatgaaggtggagcagagacaccggttttcttccagcttttcggattttattaccaggtacacggcagtgagttctacgaataagcagacgcagattgcggagtattatgccctggatccggataacgggctgaccatgaacctgggagtgaacccgcttctgcagtttggtctggaagagaccagggagatgctgtgcaggaatatcctggcagatctgtccgtgatccggtatgtaccgtttgattcggataccatcgggaaccctgccctggatccgggggatgtgctgacgtttgcgggaggacaggcagatgagggacagatcacctgtgtcacttccatcaggcagaagatcgggggaaagcagagcctgaaatgtgtggggaagaacccgaggctggctcaggcaaagtcaaggaatgacaagaatatttcggggctgctgaaccagattgaggataatgcgaagacggggaagatcgggatccatacgtttaccaatgcttccgggcatgagatcgggcagaccagggtgaagctggtcagtatccagtttgcttcttctgaggaaaaccatatgcagttttttgcacaggttgttgtggatgtggctgcggatcctgtggaacagtctgcggaggcttccgggactgtggtgattccctttccgggcggaagcggcagtggaactggaagtggaagtggtacgggtggttctgatggaaccggggagacatcggatgcaggaagttctgaaaatgatgtggctggaaatacttccgggaatgagaatacaggaagtacggatgatgtctctggtggatcagattccggatctggatcagggaatggttcggaggtttctgtggatgtgagcctgccggtgaagtggcaggaggacggacaggcggtctgccatgtggtctttgaatttaacaatgaggagattgtggagcattgtccggtggagacctggcattccgggaaacatattttgtcgctgtattatcctattgagaagatcgttgccaattatacgaatacgttcaatatgtatctctggatggagaatggcagtgggacggttgatgtgggagactgcattgcttctgtcagcggacaggcaatggcggctggggaagcctgggacggaaagcttgaggtggaagattataccacgagatttgccattggcggaggactggatgtgaatggtttccgggaatcgctgtccatgcagatgaaggagacagtgaacagaggatttgaagtgtattttgctgagagagcgggaatcagcggtttctgcaggccggtagaaatggagggtgtgtgatgaagttgaaaggtgaaatggtcattgaactgaccgatacgaatacgggtgcggtggagacagttcaggagacgaacatgatcacggaggcagtgaataatattctggggctgaatcccatggggatttatctgaaagccagcggggagtatgacaattctgttttgtggaacgggacgctgcttcccatctgcccgaacatgatcggcgggatcctgctgtttccggcagtgctggaagaaaaggcggaacatatttacgagcaggggaagaacctgccggtggcttatgcttccaacaatgtaaattctggttctgatgtagcgagaggaagcctgaatcagacggagagcaagaagctggataatggatataagtttgtgtgggagtttactcccagccaggggaatggaaatattgcagcggtggcactgaccagtgccctgggcgggcagaatgcttttggcagtgcggcaggggatgccagcacatttctgcttctgaaaaaggtggatatcggggatatcccgaagacaaagcagatgacactgtttgaggcagtggagctggattttgaaaagaacctgctgtattccatcacctttgggacttccagtgtgaccattacgaagatccggatcccggtgtttaacattgggctgaatgagaagctggacgataccacttataccgtactggaagagcagacactgacaacggaaagttttacgttcctgggggattatacaaagtatggggaatttatggacgggcatgacggatactggtatggattttccaatgagccgaattcttccggggatgcgaagatggtgtggatccggatctccaaaaaggattattcctttacggagggaagctggacactgtccaaggcgaagctgtcggaagtgggcacaagggcaaaggatggttcctatccggagcggaatgtaaaatgctgtgtgaggaaggggtatctgtatgtgccttcttatgacaaaaaaggagtttataagatcaatactgccaattcagcggatgtgacgctgatcccgcttggctttacttccaagctgaaatctcttggggaggccggctcctgtgaggtgtatatgacacttcttggggacatgatcgtggcaggggatttccagatcacggcggatgacagggtgattaagacacaggggagtgcaaggtttgaagctatggcaacgcctttgttccagtataagaactttgtgtttatgtggggcggcagttacgggaaggagcataggtgtgcttaccttctgacgccttatctggcaagtattaataatctttcatcagcggtggtgaagaatacggacaagacgatgaagatcacgtatacgctgacggaggaaacaatgtaggtctttctgccgcagggcatgaagatagaaaacttatttacggcagttctcagaaatgggggctgcttttttcatgggaggaggattctggcatgaaggaattttggaactttattcagatggtttttatggctgtaggcggatggctgggctggtttatgggaggctgtgacggacttctgtatgccctgatcgcttttgtggtgatcgattacctgaccggggtgatgtgtgcttttgcggaccatacgctttccagtgaggtgggattccgggggatctgcaggaaagtgctgatttttctgctggtgggaatggcaaacattctggatgtggctgtgatcgggaacggatccgtgctgaggacagcggtgatctttttctatatttccaatgagggcgtgagcctgttggagaatgcagggcatctggggctgccgatcccgcagaagatgaaggatgtgctggaacagctgcatgacaaaagtgagggagactcggatgatgtatcagaggatgaggaagaaggtgaatgattatgggatacagtaatagttctttggtggcgtatacgttgctcagtccgaaccattccggactgagaacggagcggattgacagaatatcaccgcactgtgtagtaggtcagtgtacagcagaaggtctgggggactggtttcataaatcttctaccaaggcttcttcgaattatggaattgataagaatggccggatcggattgtatgtggaagagaagaatcgctcctggtgtacgtccagtaatgcgaatgatcagagggcagtgacgattgagtgtgcttctgacaaggcggaaccgtatgttatgcatcaggtggtttatgagcgtctggtcgatctgtgtgaggatatctgcagaagaaatggaaagaaaaaactactctggtttggtgataaaaataagtctctgaattatcagccgaaggcggatgaaatgctcattaccgtacaccggtggtttgcgaataagagctgtcctggagactggctttatgcgagactgggagatctggctgcgaaggttacttcaagacttagcagcggaaatgtggaagtgattccatcagggatgcaggcaggggaatttcaggggctgacagaagaacaggtgcttgcaaaggttggccctctgtttaccgcagatcagaaaaaatcagggattcttgcttcagtgtctatggctcagtttattctggagagcggttatggaaagagtgagcttgcattgggagccaataactgttttggaatgaagaagtcactttccggtaatacctggagtggttcggtctgggatggtgtaagcatttataaaaagaagacacaggagcagaaggcagatggaagctatgtgacagtcacagcggaattcagaaaatatgcgaatgtagaggattccattgcggatcacagtgcttatctgctcggcgctaagaatggagagaagttccgatatgacgggctgaaaggatgctcagattataagaaagcagtgcagatcattaaggacggtggttatgctaccagtcttacttatgtggaaaagctcagcagtattatagagaaatggaaactgacgcagtacgatgtgaccggtgagacttcggatgtgatcaagtattacagagtaaggaagaactggggagatgcggcttcacagcttggtgcgtatttcatatttgataatgcgaaggcgatggctgacaagcatccgggctataaagtttatgactggaatggaaagcagatatatccggcagtaatgtcgggggcggcaggcggaatgagcagtacggactgtccatttacagtgaaggttagtgttccggatctgaatatcaggaaaggcgcgggaacggatacagcgaagaccgggaagtttaccggagttggcgtgtttactattgtagaagtgaaaaatggtaagggtgctgcgaaaggatggggaaaactgaagtccggggctggatggattagtttggattttgcttccagagtataactgaataacgaatcgttattgaacctacgggtatctgattaatttcgggtatctgtaggttttttttgtttgaagttaaaatttgattatttttctttgcctgtgacttgggaagaagtcttctcaggaaggatggaattgccatgatgacagttgaagaaatgaaggcagtagatattagaaccgtagatagagatacgcttgttgatatcaagaatgtgaaaatagacagatcattaccacttgaagagagagtgagaagctttgtggagcagataaagaatccatactgcttcagatgtggtgatgctgttgtaaaaacttcttttttggatacggatgtgactttggaagattgtgtggagagttatctgagaaatctgtgattctgccatatttcagatgtcatggaagtatcggtgctcagtgtgttaagatgaacttggtcaaatctataggcactatgtgctgagaagccttgcttcttgctgagcatttcaggaaggagatttaaggttatgagtagtaaaatttacaacgcttgtatttatgcaagactgtcacgtgatgatggtgataagcttgaaagtgacagtatcactaatcagaaagccctgatcagggactttttatcaaatcatccggagattcatgtggtttcagagaaaaccgatgacggatattccggtgtcaactttgacagaccagcattccaggagatgatggatgaaatccgttctggaaaagtgaactgcgtggtggtcaaagacctttcccgttttggaagaaattatattgaggctggtaactacattgagagggtatttccttttatgggagtgcgttttattgcaatcaatgacagttatgacagcctggataagaaccagtcagattctcttattattccatttaagaatctgattaacgatgcctactgtaaggatatttctgtaaaaatcagatctcagctagagattaaaaggaaaaagggacagtttattggcgcttttgctgtgtatggatatttgaaggatgaagaggatcacaataagttggttgtcgatacttttgcatctgaggtagttagagcaatctttaagtggaagcttgagggaatgagccagggacgtatagcggataagctgaataggcagggcgttctgtgtcctatggaatataagatttctcttggcatgaaggtgcagacgaatttcagagtgcataagaaggctatgtggtcaccggtgtcggttacaagaattctgaccaatgaaatttataccggtgttcttattcagggtaagagcggtacaccaaactataaagtgaaaaaggttatgcctaaggatgaagaggaatggattcgtgtggaagattcacatccggctattgttacaaaaggaaattttgaaacagtgcagagaatcatgcagaaggatatccgcattgctcctgcagaggaaatagtctatccattctccggatatctaaaatgtgctgactgtggacagaacatggttcgcaagcattatgtggcagggaataaggaatatacttattttatctgttctacacgtaaggcaaaaaagggctgcagcacacatagcattgatgaagatactttgatggccagtgtgctgaatgctattaaaaatcatatagatatgattttggaggcagagcagctgcttgaactggtgaagtctttgcctgagaatcagcagaatgtttttaactatgatgctcagatcgtgaagttgaaagaagagattgagcgtaacaagaccttcaaaatgaaactgtatgagaacctgcaggaaggtatgattggacaggatgaatatttcctgtttaagaaaagctatgcgatgaaaatacaggaagcggaacaggctattgctgccattgaagcggaacgtgagcagatggtaaataataacagagagcagctgtcatggatggaagtgtttaagcagcaccagaatattacagaagtgacaagaaatgttattgtggatctgatagaccatattgagattctggaaggcaagagtattcacgtagtgttcagatatcacgataactgggataagctgatagtagctgtttccaatattcctgacggtattaaatcacagatggcggtgtaggaggtgcgacatggcaagaaaaagcagaaagaatactggtgccgtaattgaaacgccggtacagacaagcaattatttttccacggcaatatatgtccgcttatctattgagaatagcggtaaggatgatgatggcgattccattgccaatcagattagcttttgtaaagcatatctgacagagcatgcagatctgaaactttacggaatctatgaggataatggtgaaaaaggtaccaactttgaccgtcctgagttcaagagaatgatggatgatatcagaagcggtaaagtgaaatgtgttcttgtaaaagacttaagccgctttggcagagattatattgaaactggtgagtatctggaaaagatttttccatttatgggtatcagatttatttccattacagatggatatgacagtctgacctgtgatgatgccgaaggtgcactgatgataccactcaaaaatatgattaatgatgtgtatgcaaaggatatttccagaaagattatcacatcattcagggcaagacaggagaagggggagttccttccggcatttgctccttatgggtatgtgaaatcaaagcaagtggcatacagatatgaagtggatcaggaaactgctccatatgtaagaatgatttttgaatggaaggcggagggtgtttcgcataatgaaatctgcaagagacttaatgctatgggagcggtaacacctgccagacgtaaggttgaccttggtatctggagagcagagagatataaaaatacggtatggtttggacgtactatcattgatattttgaaaaatcctacctacaccggttgtattgtttatggcaggatccctaagtcactgtacgaaggaatcaaaatgcatcgcacaccggaagaggaatggagatatgtacctaatgctcatgagccgattatcagtcaggaattatttgacaaggttcagaagatgtttgctgacagagcaaagaagtttcagaaaaaaatgaatgagaatgctccgcttagagaacttgttacaaatcattttaaaggaaagatttattgtggtgattgcggcaagagaatgagatttgtaaagcctacggataaaagatatccgatagaccagaatcatgcagtttatgtttgtggtggttatctggacagtggttacagcagatgctccagacattccataagatatccgcttgtggcagaagcagtattggcggcaattaaggttcagttagagtttgccttgaaacaggagcagcttatcaggcagatgcgtggatctgagaaagaaaagaatctgattgataaatacgttggtcggataaattatctgtcacaggaattgaaaaagcttaatggtaggagagaggcattgtttgagagttttgcagagggtattcttgatgaaacggaataccagtttgcaaaaaagaaatatgatgatgaagctgctgggattgaaaagaaacttactgatgagaaggcaaagaaagcacaactcgacgatgttttgtcgttgagtaacgaatggtttacagcaattcataaggcagagaatattacggagattgattctgagttggtgaaacacctggtcagttccgtaaagatatttgaggataatcgtgtagaggtggaactgaacttcaaagaccagagatatattttcaatctgataattgctgaaatggcaggtgaagaacatgagtaagtgggtcattggtaaatatattcgtctgtcacaggctgatcaggatctgatgaaaaaagagaataaatctgagagtgagagtatatctcatcagaaggcactgattcagaatttcattaatgatagtgtagaacttaaggattcaatgcagtatgagttttttgatgatggttattctggcactaattttaagaggccttcctttgagcgactgctggagaaaataaaaaaaggtgagattaactgtgttattgtaaaggacttctcacgatttggcagagattatatcgaactgggtgattatctggaaagaatctttccttttatgggtgtgaggtttatttccatcaatgaccattatgacagtgctgattataaaggaactacaggcggacttgatgtggtcatgaagaatattgtctatgattactacagcaaggacttgtctgtgaaagttaagactgcaaagtaccagaagatgaagcagggaaaatatcttggtggacatgtgccttatggcctgatgaaggactcgaaggacaagcataagctgattattgatccagaggctgcagcagttgtcagagagatatttgatatggctattgccaagatgcgtctgattgatatggcaaggacactgaatgaatgtggtgttgaaactccggggcaatattacagacgtaagcatccaggtacaaagaagtttattaattcttctgataaagcttgctggacacatgccaatctccgaacgatattgaagcaggaaatgtattatggcgctattgtaggtcataaaaggcaaggaattggtgttggatgcaagcatactgcatcagtaccgaaagaagagcagtttatcgtggaaggtaggcatgagggaataattactaaagaggagtttttgaaagcacaggaaatcttttgtgagattggtgaaacgaagaatgttattccaaagacatatcctctttacaggaaagttaagtgcggtatctgtggaagggcaatgagttataagacatattttcgtaatggagttacatacagatattttacctgtcaacatgcaaaagagcagccaggcgaagatggatgctgcaagcggtatgttatagaagatagtctgaatgaaatagtatggtctgtggtaaggcagctgcttgatatgacagatgtctttaagcagaaactggacaagcagaataatgtcagcagacaggacaatctgattctggctgaaaaacttgccaggttgcagcaggaaaaggaaaaatgcgaatcagacagatttgtaaatgtggatcagtttatggcggggcagctggataaggaagtgtaccagagaagaagagcagaccttggaaggcttgcggaaaagcttgatgctgatattgcagaagtggatcagaagcttaagacagcagaaactgtgaaggatgacagcttatcacaagctcttggtgtgatgaagaagtattccggagtggatgaactgacacaggcaatggtgcaggaactgattgagaaggttgttgttacggatccagagcatgtggagattgtttggaagtttagggatgaagtaagaaagttcatagggatttaagacaggagtcagttggatgatgagtctgattggcttcttttttgattgagaagagaggaattgtatgatacaataagttatctattttgtgaaacttgatatttgaggatttattatggttaagaacaatattgaagttgatgtaaaagtaaaatgtatagagaatggaacaacccaggcacagattgctgaggatattcagactacaaagtcatatgtgaaccgtgtaatcaagaaaccaaatggtgtggtgaataatacttttgtgcagatgatggaggcactagggtatgatatagaattgacgtatgtgaagagaaaataatttgtacgaggtgatagttatatgcttgtttttcaaacaagacctgttttgttagattatggcattgcagaaaagtttataagtaagcaattacgagagtatacgaaaattaaaaacggcgaaataaaagatacagaagaagcaataggcgtattatcagaggttattaatggaattcaagagaagcttaccaataggattttgcaagagaatacctacgatagtttactgaaactattatggatatttgatgagattcattctagtatagaataaattaaatttctgctatatatttttgagatgatgtatggtaaaatagtgttatcaaagaaaggatgatcgctatgagaaaaacatatcttcctctgtcagatgaagacaggaattaccttaaatcattatcaaaaaagagaaccattcaggcacaagtcgtggatcgtgccaggattcttttatataaagccgatggaatgacattccaggaaattgctgataaacttgcaatcagcactgccacggtacgcctttgtgtttcgaagtttcataaaggcggtgtggatgctgcactgtttgatgttcagcgtcctggacgtccatccgaaatcaccgacgatgcgaaggcatggatgatcagtattgcgtgtcagagaccggcagaactcggttatgcgcaggaactgtggacattggcttctctccataaatacattcagaaacatgcagaggaggcgggatatccaagactttcaacagttacgaaaccttatatccagaaattcctcagggaacaggatatgaaaccctttaaaatcaaatattactgcgaaaagagggatcctgattttgaatcaaaaatgcatgaagtcctgctggtctacaaacagattgaaatgcagtttgatgagaatggtgatctcattgttccagacgattataaattgacgattacggtgtcctatgatgagaaaccgggtattcaggcaatctccaatactgcaccggatttacgcccgacaccggaacacggagaggtatatcgtgatgcagaatacaaacgtcttggaacgctctctttgctggcaggcattgatctgcttacaggagaagccatcccgttagtaagtgagactcacaagagttctgattttattgagtttttaaagatactggacaaaaaatatccatcacaggatacaatccggatcatcctggataatcattccgcgcatacttccaaagaaacacggcgctttctggatacgctgccaaagggacgttttaaatttgtgtttactccgaaacatggctcatggttaaacatgattgaaagttttttcagtaagatgacccggcagatgcttcgtggaatccgtgtcaataccaaagaggaattggaagagcgaatttacaggtattttgatgaagtaaatcgtgaacctgtgatttatcactggaaatataaaatggatgaaatcagtgaagaggaagcggcatccgtttgatatagcaattatttaatattcgttatactagatatcttaaagagaaagaagcaagagttaaaatttcgcagaaaagattttttaatgaggaattgacatcgatttttgcagagaatagaaatgtcatgcgctatgtaattgatgcatgtaatgtatggattgaaaattgtattttgctacagcatgatgttgacatcaaatcgattgatataaaaaagatgttcgtgttagatagagcgttgttaagtgatttattactatatggtattgcgtctcatacgatgtctctgctgatgctttcaagaaacaaagatatgaaatgtccatattatggaataaatgtggatactaaaaaaataattccgattgaaccgataaaatatcatccatatatttactatgatactgttattacaggaaatcaaaatattttgtcgcctataccattaactgcagatgcaaatgatactgattttggtaaaggatttaagaaagaaactgacatagagtttttattgtttttagctacggtttacgctttccaggctaatgaactgaattctgatgataaatctcttagaataatatcgaaaaaagagtttattaacattgttgagcatagtactaatccggctatttcaggaagtgtattttttgataatttcgtgctttcaaaggaaaaacttcaaaatcacctccgaaaagatgaatgtataatctgggtcatgggtgccaataaatacagattggaactgagaccatttatatgcttagatgatgaaaatattattgtcccatatggaacattggagcaagcaaagcaactatgggtttcgtatcaaagcaatgggggaatgtgttatactcacccggcaaaaatggatcctattaaagagagtctggatagaaagaatacagaattatcgaatgtgttacttcaacgaataagagaaaccttattggcaagctacactaatccgacagttaatttggtagatgtaagatatgatcgtattttcggggaaaaagaaattgattatggagattatgatgtaatatttttctcttcagaagcgaaagaattatttttgattgaagcgaagtatttttcggattctcttaatgccagtggtatagttacagattatgaaaaaatgtaccaggcaaatggttattatgatcattgtaggcatcgttatgatttggtgattaaggaaaaagaaaaactaaaagagtttttaggaatagaggattctgttaaacttcatatgttatttgtttcttcaaaacctttagagatggatttgaaggatgaggatgagatggttactattttgccattggatctgttagatatgtatctgcatggaaaacttctggatggcgaaactggaaacatagtagaaacaaagtgggtgatataattgaatttctaccatctaaaatatggcagaaaaaattgttagacctatcttgacatacgctgatgaggctcatcatagttctgcagacagctataaaaaaattatgaattatttcaaaccgaggttatggctggggatgacagcaacaccggataagcgtgatgataatctggaaggcagaaatatttacgagatatttaatcatcagattgcatatgaaattcgtttgcaggatgcgatgaaagaggacttgctgtgtccatttcattactttggaattactgatctggaagtcattgctgatgctggaaaatcgtctgaggaaaaatttgaaaattttaaatatctgacatctgatgaacgggttttaaatgtgatgaaacaggcaaaattctttggctatagtggggaaagagtaaaaggtttgattttctgcagtcgtattgatgaggcaagagaattgtctgcgaaatttaatgaaaaaggttggagaacgcttgtgttaagcggaagtgattcagaaactgtaagagccgcagcggttgaacgacttgctggcgatgaggcagaagatgcgttggattacatcatttctgtggatatattctcagaaggtgtggatgttcctgaaattaatcaggtaattatgcttcgcccaaccgaatcaccgattatttttatccaacagttaggacgcggactccgcaaagctgaggataaagaatatgtggttgttattgatttcattggtaattatcgtaataattttatgattccaattgcactttctggagatagaagctataacaaagataatattcgtcgttatgtaactgaaggcggccgtgtgattccaggcgcaagcacaattcattttgacgaaatttctcgtaaaagaatttttcaagcaattgataatgcaaactttaatgacattaaattaatccgggagaattatatgaatctgaaaaataaactggggcatattccggcacttgcagattttgacaaatacggagagatggatgtacttaggatttttgataataatagtctgggatcttattataagtttcttgtgaagtatgaaaaagaatacacaactcgcttatcaaaagatgaagaaaccgtaatagaatttgtttcaaagaaattggcaaatggaaaacgaattcatgagttggaaatgttaaagcggctgcttaaatatcaaaatggaatcatggatttgttaaagaaatcattacacgataattataattgttcgatgaatgataattgtgctgaaaatgttgtaaacatgatgacaaatgaatttcctacaagtgctgctaagaagacgtattctcagtgtgtatttctggaaaaagacggttctgattataaggtgtctaagttgttttcagagatgttacaaaacaaagatttttatcgcattttggaagaacttattgattttgggattttacgatataaagacaatttcagtatgagatatcaagatacggatttagttctttatcagaaatatacatatgaagatgcctgtcgtttgttaaattggaaaagaaatgaggttccattgaatatcggtgggtataagtatgataagaaaacaaaaacctttccagtatttatcaattatgataaacaggatgatattagtgatacaacaaaatatgaagaccattttacaagttccgatcatttgattgctatttccaaaagcggacggagtattgaatcagaagatgtgcaaaatttcctgaaggcaaaagaacgtggcatagatgtgcagctttttgtaaggaaaaataaagatgataaaatttcaaaagaattttattaccttggaagaatgacttcaacaggagcagtaaaagaatttgtaatgccaaatactgataaaacagcagtagaaatagaatgggcattggacaccccagtgagagaggatatttacgaatatattgtaaatggataataaaaataataggagagaaaaaaatgaaaacaattagagtagtggcagcaattttgattgataatgaaaaagtatttgcaactcagcgaggatacggagagttcaaagatggttgggagtttcctggagggaaaattgatgtaggggagactccagaagaagcactagtataacgaatattaaataattgctatatcaaacggatgccgcttcctcttcactgatttcatccattttatatttccagtgataaatcacaggttcacgatttacttcatcaaaatacctgtaaattcgctcttccaattcctctttggtattgacacggattccacgaagcatctgccgggtcatcttactgaaaaaactttcaatcatgtttaaccatgagccatgtttcggagtaaacacaaatttaaaacgtccctttggcagcgtatccagaaagcgccgtgtttctttggaagtatgcgcggaatgattatccaggatgatccggattgtatcctgtgatggatattttttgtccagtatctttaaaaactcaataaaatcagaactcttgtgagtctcacttactaacgggatggcttctcctgtaagcagatcaatgcctgccagcaaagagagcgttccaagacgtttgtattctgcatcacgatatacctctccgtgttccggtgtcgggcgtaaatccggtgcagtattggagattgcctgaatacccggtttctcatcataggacaccgtaatcgtcaatttataatcgtctggaacaatgagatcaccattctcatcaaactgcatttcaatctgtttgtagaccagcaggacttcatgcatttttgattcaaaatcaggatccctcttttcgcagtaatatttgattttaaagggtttcatatcctgttccctgaggaatttctggatataaggtttcgtaactgttgaaagtcttggatatcccgcctcctctgcatgtttctgaatgtatttatggagagaagccaatgtccacagttcctgcgcataaccgagttctgccggtctctgacacgcaatactgatcatccatgccttcgcatcgtcggtgatttcggatggacgtccaggacgctgaacatcaaacagtgcagcatccacaccgcctttatgaaacttcgaaacacaaaggcgtaccgtggcagtgctgattgcaagtttatcagcaatttcctggaatgtcattccatcggctttatataaaagaatcctggcacgatccacgacttgtgcctgaatggttctcttttttgataatgatttaaggtaattcctgtcttcatctgacagaggaagatatgtttttctcatagcgatcatcctttctttgataacactattttaccatacatcatctcaaaaatatatagcagaaatttaatttattctatactagttagagaaatcaaagaagaacttgatacagaaattgaagttctgaaattgttggatacagttgaatatgattatccaaacttccatttatccatggattgctttatctgcaagattaaatcaggtgatttggtattgaaagaacatgaagattcagcatggttaacgaaagatacattatatagtgtggattggctaccggcagatcagggattgattcccctggttgagaaacacttatgattcctggactgaggacaccgatgcggagacggtgaagacggtggtagccggacttcagatgatgggactcaacgcaaaggaagaaaggcggaccatcaagaaggtctttgatatgagaccacagccacagccggatgctataaaacagccacaggaacagcctaatgaagagccggatggctgacagtggagattcctcgcaggctgatgaatgatacggtacttgccaatcttgactgcatcatcgatggaaagggtagcctgacgaagaaaataagcaggtgaactggtgctgaaaagccgtgatcgaacttatgatgagttctgcgaaaaagaggaactcggaggaatggtcacaagtcggttgaaataaacaggcattattcagtctaatgataaggattacgagtaagaccaaaagggtcactttcgagaggaggtgatgccttatgccaaagaaaagtaaaacattatgtgtagatgacctgcgtcatgcggagtactacggaatgcaaggtacttttgatgaactatatcaaaaaagtcagaacggtgaagtatttgagaatcttatggatttgatactgagcagggataacattttacttgcgtaccgaaacatcaaagcgaacaaaggcagctacacggcaagaacagacaaaaagaacatcacagatattgggagtcaaactcctgatgatgtggtaaaaagagtgagatttattgttacgggaagcgaacacggctacagaccaaagcctgtaagacggaaagatatcccgaaaccaaacggaaaaacacgtccgctgggaatcccatgtatatgggataggttgatacagcaatgtatcaagcagatcatgaaaccaatctgcgaagcaaagttcagcaataatagtttgtactggtcaagctttttggtaacactttgttcggaaatcatgctctatatcgaaactccattggtgtcatatagttattcgttgaatgaggtctcacatagttgtaccagttaatgtattgctttgtcatttcatctaactgctcaacactttcaaaagtatatctatagtaaaaataatttttgaaagtattataaaatctttccattggcgcattatcataaggacagccagccttgctcatactttgaattacgccgttatccttgcaaaaattgacaaactcccaagatgtatattgtactccctgatcgctgtgcagaagtattccattgcttggtttttctttttttagggcttccgtaagtgtttctattgcaagttctgtatttatgtaatcgctattgactgatgctatagcagatctgtcaaataaatccataatggtacagttatatcgaaacttaccattaggctgacgcatatatgtaaaatcagtgcaccaaatcttatttttttcatcgacgttgaagttttgttttaagagattatcaaagattttatgttttttacagcttttgtaacctggcttttttctcataactatagcagacagattaagatccttattcatatatttatggatggttgttgtactcagatgtataccatatctttgtagaaagattttcataggccgatatccaatagttctattattgttgtaatagatatactttatcctttcataaaccataaatctttgctcgtaataatctcttttcgtatctttcagataattgtagtaacaattaagactaatcttaaaatgtctgcacaaccatcttaagccaaattgctccttatttttgtcaatgaatcgatataccactaatcgatttcctttgcaaagaatgccgctgctttttttttaaaatcaatttctttatccttctcatgaagaagctggttcagtcttctgatttcctttgcagattcgaattcttcctgtgatgttttagtggtagttttatattggcattcttcaccatgtttttttacccacccggtgagggtgctttttgcaacattgtagtcagctgctatctcacttattgagcgatcacctgccatataggctttgactacttcaattttaaaattttcattgtaacgtgtggccatgattggtccctcctttggataataaatattatatactatccgaacaaggtgttacaaatttagtttaccactacagctacttatagaaaaaaatccggtaaactgtaccgaggttatacagctaatcttgaagaaacagttggtaagaatggctctgtaatcacagattatcagtttgataaaaatacacataccgatagtcatttccttcaggatacgctttcagcaatggaaaagtccgaagaagaaatcattctgattacagatggtggttatgacggacaggataacattgctcttgcaaaggagaaaaatgtcaaactggtaacaacagctctgatagggaaagaggctccagatgctttggctgactttgaatttaatgaggatggaacccgtctgttaaaatgtgccgcaggtcatgagcctataagccagagttttacaaaatcaacaagacaatgcagagtatcatttgaccgtaatcattgtgctggttgcccatatcaagatcagcgccgtccaaagatatataaaaaagttgccacttttattgcttcaaaaaatgcatctaacagagcgaaaagccaaagatacatgcagagtgaagaattcagtaacttagcaaggttgagaaatggtgtagaaactattcctgctaacatccgaaagaattatcatcttgataaacttccaagaggtaaacagcgtggtaaatttttctttggaagcaaaatagctgcattaaatttccgaaagctctttggattccgaaagggcttgggtaattatgctccaaatccagtattagtgtaaaatacactgaagaaatagtaaggaatgacagtaaacaatagtaaacgctccataagtgggggtacccactatggagcgtttacgtatgaaatctcagagacagtacaaggtcttccgatattttttcggatgaccttgttttaacattctataactgtttcatgataaaacgataatcagtaggtgccatttgaaaattagtataaaaaacctggttaaaatacttggtagaagtatagcctactttttctgaaatgtcagatactttcatagtagtatgggcaagaagctccttagcggcttccattcgacgttctgtgagaagctgtgaaaaacccatagagagttctttctttagcaaccgggaaatatatgagctattgcgatttataaattctgcggcatcatttaatcctatttgtttttcatagtttttatttatgtattctataacggtattaacgattattcctgtgtttcgtgtagtgacacaggacagttcctggataatgtttttgatgcagttggaaaaaatagttctgctgtgttcgctgcagggttgttccatgcagtagcgtgtcatcggagcagtaagatagctgctgtccctggaatcatccagaaaatttttcagttgaatatgaaggtttaattcgactagcttgatagcatcctgttgagtgagcagattttcattctgtatcagtgaaaaaaaagcatctccgatttccagtgcatcattgagattacgtgtctgaatggcattgatcagattggaaatgatttcgttaatctcaataatactggaattgtaatcatttatttctgcaaaaaataagatactgtcttccggtgaaacgatgttggaagctttataagaaaaacaatattgtatctgtttattgagcttaggaaactgttgaatagagtttccgagttcactgattccaattgtgatagaagaaaaaagtttttccctggtataacagatcagtgaatatgccaggcttttaacttctgcaacagggtcagcagatgtaacaggcataagaatatatacaatgtttccaatatagcatgatgcaataccgtcatagtctttattaatctttttcgacagagaataagaaatatagtattcctgattctgcaggatgttcatactgttcgtggtattacacttaataccaatcaaatagaacaaatctggattcagaccaagtgaaagacattgccggagctgttcaggagaaaaactggtgacaggattgatcagcaaagtttccataaactgttttttcaaaagactctgattttctttaaaaaatctggaaagcatttctttttgtttctctatatttccctgctcctgaactgcatttatggctttctttaagcaggcaaggaatatgtcactgttcaatggtttaagaaggtaatcaaaggcatcatatctcaaagccgcctgtgcataagaaaactcggagtatccggagacaaagatgaccggcaggtttaattgtgattcagatattttctgaagaagatggattccattttcacagggcatttgaatgtccgagaacagaatatcaggatgctttgtctgaatgatggtccaggcatcagctgcattagtggctgtcaggatggtgtgagatttaaagtcagactgccggattatattttccattgtctgaagtgcaattgcttcgtcgtcaacaagtaatattttcatttcagatgtcctgctttctcaattggtttttctactagtttcaaaggaagacgaaccgtgatacatgctccattgttttcgttattttgtaggatcagtccatgattttcgccataatagagcttcagtcgtttgtcgatattgtaaattccgtaagcggtggagggcttttgctgagaacttttggaaaaattttccatgaattcctgggaaaaacctggaccgttgtcctttacacaaatctgcagatcggcaccatctgtacttccaaggattgcaatgatgcctttgccagaaattttggaggttccgtggatcactgcgttttcaatcagaggctggagaatcagcttgggaatatagcaatggtataaagctttgggaatatcaattaaaatagtcagattatttccaaaacgaagtttttgtatataggtatattcttttacataatacaaggtctcttccagtgtgttgaatggtttgcctttcagggacatgcgctcaatatcagcaagtgaattcagtgcatggtgacattcttcttttctgtccatatctatcaggccggaaatacaattcaaagtattgtaaagaaagtgtggattgatctgtgcctggagactttcaatttcaatattctttgtaagaatttcctggtcatggatcttttcagataatgcacggatacgcgaaagagtctgattgtaaacattggataactgggaaaattcaatggaactattcatatggataaatgcatcattatcaattgcttttgttttatttagtttttccatgaaatagtcaaattcatccgctatacttcgggagataaaacgtgttgctccgataattgcgattagagcaagaatagatggaaaaagcagcaggatcacgaacgtgcgggttcctttataaaccagagactgattggttatcagcaataattgcagattacttatgctggtggaaaaggaatctgctgtatatttatatatctgtgtatttaaacgttcagtttttatgagttcaataatattctgttctgaaagttcagtagtattcctgaaaatatgatgattattgtcaattaaaacaaattggtacacgttactgttcagggaaaagattttatcaaaaacagcagccttggactccacaaccagtgtgccaagacgtttttttcctgtagtctcagtttttccagtccattgataaatagttcgacacatgtataatttgtctgaagcatcactgatctcaaagatataaggtaatccgtggtaatcatcaccttttttcagaatttctgaaatgtaagacggggaaaaaccagatactggctgtgatgagttgctggctgttgaaatcagttttccgctgtcagtgataaaaaatacattatctgaatagttaacacttaaagaaggataatagggggcgtcatttaataaaagcttttggaattcctgtccatcatcctgtgttatgtttataagattgttttgtgttgtatttttatagcaaaagatactggaatctgaggtaaactgagtaaaataggattccagggatgtgagagccgtactagcgtaggctgttttttcattctcagaggattcttttactgagtgaaaataaaatatggtatcgattgctccgatggaaagaaatgtgatcagtaagataggaatcacataacgcgtgtatttaattcgaatgctgacagggtgagttgttttttgcttcatacaaacctctttccgataaatgtattagatattttgtctttttgtaactgttcagtatcctcacagttatgtttttttattataactataaatgagcaagttcgtgattttgcataaaagaaagacacctcgattccgtgtgttgtataatgaaagtgcctaaacaaacatttgcaacatttacgaaagaaggtgtctctcgcaaatactatacatcattcctcattcatatacaaccagtttaaaaaattaaacttatgcaaattttattcgtaccgagtaataaaccatcttatgagtatcctaatcagtattttcatttcaggataccatggaaaaaccacggactttgctaaaaacagttcctgtcacagaactacgattgcccatttcctcaattccggaaaatgggatgattcattactttcagatacgttaaaatgctctgtcattgagattatttattcagaagcagcacgcaccggaaagcctgttttctgtattgtggacgatacgatcgcttcaaagacaaagccttcgtcacaggctttacatcccattgaagatgcgtattttcaccaatcccatttaaagggaaaacaggattacgggcatcaggcagttgctgttatgctttcctgcaatggtattgttctgaactatgcttttgtaatgtacaataagtcaatttccaagattgacattgtacaaaacattgcaaaggagctgcctgttccaccggtaatgtcctattttctttgtgactgctggtatgtttctgaaaagataatcaatacctttgcacagagggggttccataccatcggtgctttgaaaacaaaccgtttgctgtatccatcgggaatgaaaaagaaacttagtgaactggccgccgaattgtctgttacacatagtgaatttgaccttgtgacagtcaaaaatgaaactattatgtgtaccggtacgagggaaacctcaacggcatagaaaatgcggtagttcttttgagttatccggaaaaggcatttggtgatcccaaagcattgcgtgctttcatcagtacaaacgcagccctatctacacaggagattctttcctggtatgtgtgtcgatggcctattgaagtattttttcgccagtgtaaggataaactggcactggacggctatcagatacgctctgcacagggaatcaaaaggtactggctacttatgtcactggcacatttcatgtgtgcagtgggtactggtaggttttgttcgtttgaaactggatatcacgaaatctgtgataccattcagctggaaaagtatcgttatctttttcaatgcgcaaaagaaagtaatgattttgattcatttatgaaatttgtagtgtagttttgtgcaatttttcaaatttgctcatttatagtattataacatatgagactcggaaaaaaagagaaggtaaaaaatttggtataggatgtcattattctggaatcgaaaattactatggatgagaatataataaagatatcaaagaacaggaggatttaacttatgagaaagagagtaatcagtaccttgttggtaatggcaacaacagcaggtttattttctggaaatgtgtctgcagtgtatgcagaagagcagtcatccggagattatgaatatcaggagctggaggatgcggaaattacatactttaattattccgtagaaggaaaagaactgtatgagaaagaaattgctgcttataacgaaattcatccgaacgtgaaaattaatcttgaattagttggaggcggtacagactggcgttctacattaaaggctgaaatctcaagtggtcaggcaccggatcttgtggttatggaaggcgcatctgattttgctacatttggggacatgattgaagatctcagtgatcagccgtgggtggagcatatatatatgaaaacaatatcgatgactgcaaagtcgaggatgcaatagttggtgcaccatcaggcgtagtgtgctatggaatgctgtataacaaagctgtttttgaagcttgcggtatcgatggttctacattaaagagttatgatgatattgatgcggcctttggtaaggttcaggatgctattgatgcaggggaacttgcagatcagttcccggatctcgaagcagttgtttcacttccggcagcagaatcctgggtacttgcaaatcatggtgcaaatccggcaattcaggcagagcttggaacggcatttgatacttatgaagcggagtctcttgattttacgtatgcagatgcattaaaggactacattgatctgatggtaaaatattctcctgacgcagacaaaccagaagcgctggttggagttgattatgacagtgcaatgggtggttccttctgtatcggaagaacagctgttattcagatgggacagtgggttgctcctgtaatcgacgaaattgatccagaacttcgtgaaaatattggtgttcttccaatgcctttaaagggtgtggatgaagataatatctgttatggtattgcttcctattttgttgtcaacaagaattcagatgatgcaaaaaaagctgctgcaaaagattttgtaaactggctgcttatgtctgacgaaggaaaagcaatgattacttctaatatcagtgttccatttgataattttgaagattttccatctgaaaatgttatcagtcttgcatgcgagccatatgcaaaagaaggaaataccttctcattagtatttggaggttatccggatggctggtctgatttattaggtgctggaatccagagctatatcgccggtgaaaaagagtgggatgctgtcatcgaagaagccaaagcgaactgggcagaaatgagataaagaaagagtttcaggacagccggacgatattctggctgtccttttatggaggaaacgatatgcgtaaatcaaaaaaaatattctggctttttcttgctccttgtttgattactttttgtattgctgttgtaattcctacattaacaggcatttattattcttttacagactgggacggactccatgcaaattgtgattttgtttttttagacaattatatcagtgcagttcgtgatatttattttcaaaatgctttcgtttttacttttaaatttgtaattataacagtgattgcggtaaatgtggttgcatttgcagcagctatgctggtaactcaaaatataaaagggaaaaatttattcagaagtatattctttatgcctaatctggtaggtggtgtactggtaggttttgcatggcagttcattttttgtgatgtatttgacagtattggagaaattcttggaattaactggctctgtgactggctttctactaagtctacaggtttctggggactggttattcttgttgtatggcagatgagtggatatatgatgctgatttacattgcacagatacagaatattccggaaaatctgttggaatctgcgagaattgatggtgcgagtgcttttcagtgtttctggaaaattaagcttccgttaatgatgcctgcttttaccattggacttttccttactctgacaaattgctttaaactgtatgaccagaacctgaccttaactggaggcggtcctgcgaaagccacggaaatgcttactatggatatctgtaacacggcattctcaagaaatatgtatggaatggcacaggcaaaaggtattattttccttattgtagttgcatttattacagtaagtcagttgatgtttacaaaatctaaggaggtggagatgtaatgcagagaaaaaaaataatctctaaaacagtgattatcctgtgttgtattatgctggcggcgttttttatcttcccgatcttattattgtttattaactcatttaaatctttaaaagaaatctacatgagtgttctccagcttcctgagaccatgaatttggacaattatgtttctgcattcaaagaactggattacttgaatgccatcaagaattctctgattgtaacatgtacggtaacggctgcaaatgtgatctgctgttctatggcagcgtgggtgctggtacgatataaaaccaaaacaagcagactgatatttaccattttttccgttgcagtgcttgtaccatttcagtgtgtcatgcttccactgctggcagaaatgggaaaattaaatatgatcaatatgccgggactgatgcttgtaaatcttggatttggttcttctatgtcgattattttattccatggatttatgaaaaacgttccggtggaactggaagaggctgcggcaattgatggcgccagtcagccaagaatatttttcacaattgtgttgcctctgattaaaggaattgcagtaaccgttgccatcctgaatgttatgtctctttggaatgattatctgcttccgtctttgaccatcaaccggagcggaacacaaacccttccacttagaacatatttattcttcggtgcttacacgaagaagtggaacctgggttctgcagcgctcgttatggcaattattccggtaattattttttatgtcctttgtcagaaacacattattaaaggtgtaacggagggcgcagtgaagggttaagtttagctggttatgatgaatagtgacggttaatagtaaaggagatagaaactatgtgttggactgtaaatgagataaaaaaaggtgtttggcatgttgatgagagtggactggacgctatgtatgtggtaaagggcagcaaaatgtctgcggtgattgatacgggaactggaattggtaattttaaggggttggtagaatcgttggtgggtaatccctatattgtattgatcactcatggtcatgtagatcatgccggcggatgtggtcagtttgaagaagtttatattaatgaaggcgattatcaggctgcactgaatataaaggtggaagacagggaaagatatttaaagaatatggaaagtgccggtgctattgcacctggcagcctgagtatttctgaaaaactgagaaatgatcagaagccagtatttcatttttttaaagatggggacatttttgacattggagataaaaagctggttgtatatgagatgacaggacatacagctggatctgtatgtattctggatgaagaagacagagttctgttttctggtgacaatgtaaatgatctggaattgatctgcgcttctgccagcgatcgtgaggctttattgaaagaatggtatgaggccggaaaaagaatttttgcaagaaaagattcatttgatgtctgtggtggcgggcattgtctgatttcaattgaaaaagcggaagaagccctgatgtgtgggaaaatgattttatctggtgaattgcaggcaaaagttgaaaaagttcattttttccatgcaccattttataagtataaaaacagccgtctttataatggcgattttgcagcactttattcaaaagaataatgaagaacaaagagcattaggaaactggtgctctttctttatatatggtgcttgaaggagaagccggacatcaggactctatcgtacggacagaatattctgtgaatactctgatagaaaatggcgtggaattagaaaaactgggatatgcgattgccaattggaacagagcgtaggctcagaccaagacagcagctctgctgacccagtatgctggaaggattgaactgattattgcaaataatgacgatatggctcttggagcaattgatgcctttcgggattcgaagatcccaaaagaagactggccaggagtagtaggtattgatggtaccgacgttggactggctgctgtaaagagaggcgagatgattggcacagtatataatgacaaagaaggacaggcccaggaaatgctgaaccttgcttttgcaatcgcaacgggggagactgtccgaaaaccaggatgagttttcatcagaattgaattaagtttgattcactcatatgagtgttcaatatagatataaaaaactgcagttactgttcagaggtatgcataagtcattgtaaaaaataacgaaatttatttttttattttgtggatattcattttggacaggaaaaactgtgtttatagtttttcctgccgttcttttgggacaaagttatacaccagattctggatttcagagcccgttttcgaagtttcatggctgatatcaatgctttttcaatcgcaaaacgaatacttatccacagtcaaattgacgaaagaacgattttgggaaattcgctttttttctatgtttttgttatactctttcataagaaagagaggttttcttatggacatcgatttaaaagaagaattgaaaaaacgtgatgaacttctcgctggttacctcaaacagattgagatacaagaggaatttatccaaaaacaaaaggaaatgattgaatatctggaatggtcctatgccaagatttagtacaagttaaaatgaggttttcctcatcttaacctgccagctgcaattcgtcttgcggaagtctacgatacagctcttcataatcgtttggtgacatataatcacagtgactatgaattcgtttcgtattgtagaatgcttccaaatattcaaaaatcaaacgatatgcatggtcataatctcgaatcttaaaccgattcagccattctctcttaatcagggaatggaacgactcaatacatacgttatcccatggatatgcctttttagaataactacactgcatggttgcggttacatgtttgtattcttttgatacatactggcttccccggtctgaatgcagaattaaaggcttatcgatattgcgtcttgctttggctttctttattgtttcaatcacgcaggatacttccaatgttttggaaagtgtccaggcaatgatttttctggaatataagtccatgatactggtcagataaacaaatccgtctatcgtccagatataagtgatatcagagcaccaaacagcatttggacgttctggattaaactgttcatcaaggatattttttaattcgctgctgaagtcagaatctttggttgtgatcgtccatggcttgacccactgggctttgatgcccatttgcttcatatacttaccaacagtacgttcggagatgatttctcctgatttacgcaattccttggtgattttaggggcaccataattctgtttggattcatcgtaaatatcctgaattttagcttttacggctttacgtcttttttccgtattagaaggaacacgttttagccacgcatgataaccagaacgagaaacgccaagatgtttcaacattccgaagacagaaactcggcgcttcgccttatgggcagtttctgccatctccgtaacttcgagataaatggcttccgtcattttcccagaatgttgattgctttttttaatacttcaagggcatcctgtgcatctcgtaattctcgttttaatcgtgcgatttcttttgcttcatcagaagcatagttaccggaaccacggctttcaatatcacctgtttcacgcagttctttctgccagcgtgataatgtctgctgactgattcctaagtttgtagcacagccttgcagtcctaagttcttgtgatcatgatagtactggactgcatccagcttaaattgtttatcatagtgctttgccataatgagatcctccttcagtgcggtacctacattgtaccataatttttcttataaggaattctcattttgacttgtactatttatattctaacaccactttcaaaaattgtttttactatagatatacttttgaaagtgttgagcagttagatgaaatgacaaagcaatacattaactggtacaactatgtgagacctcattcaacgaataactatatgacaccaatggagtttcgatatagagcatgatttccgaacaaagtgttaccaaaaagcttgaccagtacacctgtaagacggaaagatatcccgaaaccaaacggaaaaacacgtctgctgggaatcccatgtatatgggataggttgatacagcaatgtatcaagcagatcatgaaaccaatctgcgaagcaaagttcagcaataatagttatggatttcgtccgaatagatccgttgaacacgccattaacagaacctacaccatgcttcaaatgatgaactttcattatgttattgagtttgatgaaacagagcaaggattgccagcattaatctatggtgaacaaagagtgagttcgttgccgatataggacattacaggagaacacatagatacagataatgagtatatgtattattattcggttgagtttgtaaaataagaatagcaaaaagagagaagaggatgccatggactcgttgatttgatgattccgtggcatcctcttttggagaggaaactggatttatgatattgtggattttagaacttgtttcttatctttcggtattctctcggcgaatatcctttcagcttgtggaaaagccggctgaaataaagctgattatcatacccgacgattttagaaatttcattgatggaataggttgttgtttcaagtaacatctgggcattgttaattcggattcccacaataaactgcattggtgtagaacctgtgtattttttgaagtttcggataaaccagctgacactcattccacgtgaggcagcataatcatctatgctaatattctggttataattttcactgaaaaaggtaactgcgttatccatctcgtgatccaggtattcatttttcgagatatgttccctggtcagttcccgatgaaagatgataagaagatgacggagcagaaggacaagcatttcctcataattatcttggcaacgctgaagctcgatgataatacgcttgaaaatctgttcgtattccatagaggttccgacctgaaatacacgctctttatccgggaatccatattgccgtaggatattttttacattgttgcctgtaaaatgaatccagtatacttctgtcttatcttttccataatattcatatttctgaagttccttcggtctgtacagtacaatattaccggcggggacaatcgtctcgttatccacattgtcaaaatgaaaatgcccacaaccagcagtgatatagataatctgataatccaggcgtccccttggacggtaggttggtaactttggatggctggaaaggcggtaagtaccgcaacttcctacaaccagtgggcgacttttgtctttgaaatccatatgggagtggtttaaataaccggtattcatatacatatggtagcacctctttcccttttttgttattgtatcatttagtgtatattttgtctaatccaattcatagacatgttttgcagattaggataagatatatatagcaaaacagagaaacgtaaacataaaagtaaaagacaaggtttgctgtggaaaaacaaagtgcaaaaaaatgtatatgtattaaaggagagttatttatgattgtaccacgttattatgaggatttaagcgtactgcatgaaaatacaatgccagccagagcctattttattccggcatccaaaagaatggataacctggtggagcacagggaagagtcagaccgaatgcagttattgaacggaacttggaagttccagtattttaacagtatctatgatgttcaggaacccttctttgagaaagattatgatacagaaaattttgatgagattcaggttccgagtgtatggcagatggcaggatatgacacacatcagtatacaaacatcaggtatccgttcccatttgatccaccgtatgtaccacaggatattccatgtggaacatatgcacatacctttgtttatcacaaagatgaaaatgcaccaaaagctttcttgaattttgaaggagtagacagttgcttttatgtatggatcaatggctcttatgtagggtatagccaagtttctcatataaccagtgagtttgatatcaccgacctccttcgggacggagagaacagcatagcggttctggtcatgaagtggtgtgatggttcctatttggaagatcaggacaaattccgtatgagtggtattttccgggatgtgtacattttgaaacgcccaaaacaggcaatcagtgattatcatattaaaacaagaattgaagatatgcttgcgaaagtagaaattgaaatgaaattctactctccgttaaatgtaaaaatttcgattgaagatagaaacggagcagttgtagcactaggaagtattgctgaagaaggaacagctgtattagaaatcgcaagtccggaactttggaatacagaaaatccatatctatataaactgattcttgaaacagagaatgaagtaattgtagatcacattgcattaagaaagatagagattaaagaccaggttatttatttaaatggacagaagattaaattccgtggtgtcaatcgacatgattctgatccggttactggatttacaatcaatccggaacagattacaaccgatcttacgttaatgaagcagcataattttaatgcgatccgttccagccactatccgaacgcaccatttttctatgaaatgtgtgacaagtatggattcatggtaatagatgaagcagatattgaagctcatggtccatttatgatctacagaaaagaagacactgattacaatcggttcaaacgatggaatgagaagattgcagatgatccggtatgggaagaggcaatcgttgatcgcgtaaaactcatggtggaacgtgacaaaaaccgtttctgtattgttatgtggtcaatgggaaatgagagtgcttatggctgcaactttgaaaaagcactggaatggacaaagaattttgatccagaccgtatcacacaatatgagagtgcaagataccgtaattatgatgaaacatatgattacagcaatctggatgtgtacagccggatgtacccagcgctttccgaaattcaggaatatctggataaagatggaagcaaacccttccttttggtagagtactgtcacagcatgggaaacggacctggagattttgaagattacttccagatgattcaggataatgataaaatgtgcggcggctttgtctgggaatggtgtgaccatgcgatttctcatggaactgctgagaatggaaagactatatatgcttatgggggcgaccatggcgaagaaattcatgatggcaacttctgtatggatggattagtatatccggacagaacggtacatacaggacttttggaatacaagaatgtttatcgcccagcaagagttatttcctataacaaagaaagcggagaactggtgcttcataactacatggattttgatgacttgaaagattatgtgaagattagttatgagctgacacaggatggtcttgtgatcagcaaaggcatacttccggagttttctgtggcaccacacggggaaggaaaaacaaacctgaagatcaatgttccagagaatgggaaatgttatttaaaacttatttaccatctgaaaaaagaattgccactgttggatgaagaccatattcttggatttgatgaaattgaggtaagtaaagaggatacaaaatgtaaacttgcagagaaatggataccaaaaacggtagtggactctgaattacaggtaaatgaaaatgatacacagattcatatcaaggggcgtgaatttgcttataccatagacaaacgtactgcactctttacagagatgaaattcgcagggcgggaatacttgaaccatccgatggaattaaatatttggagagctccaacagataacgatatgtacatcaagtctgaatggaagaaagcccactatgataaggcttacacaagagcctatacgacagaggttgtgcagggaaaacatggtgtgaagattacaagccatgcttccgttgtggcagagacagtacagaagattcttgatgtgacgattacatggaaaatagaagctgctggaaagattgatgcagatattgcagtaacaaaagacgatgaattcccggatcttccgagatttggtgtgaggatgttcctggataaaaaactttcagttgtaagatactttggaatgggaccacaggaaagttattgtgataaacatcaggctgcgagccacggtttgtaccgggcagatgtaggggatttacatgaggactatatccgtccacaggaaaatggaagccattatgattgtgaatatgtagagcttaacaacagtcgatatggaattgtggcattcgcagaaaaggcattttcattcaatgcttcttattatacacaggaagaacttgagaagaaaacgcataattatgaattaatagaatcagatagtgtagtattctgtgttgactacgcattaaatggcattggttctaatagttgtggtccagttgtattggagcagtaccgatttgatgatgtattattccggtttcagtttacactgataccgtatgtaaagggataataaagtttcatgtaacccgtaaacaaggaaagagagtctgattgtaatgtaaagtccggatatacagagcaatcagacaaaaaaacagaattagatatcatacggttagccatattgagattctaagtgcgatgaagatgaggagcaaagaaattcgatggaagaaaaaaagtatttgaaatggtataacaaaattggatacggatcaggtgatattgcaggtaatgtagtctatgcgttcctgacatcttttatgatggtctatctgacggactcggtaggacttgctgcaggtgtcgtgggtaccctgattgccgtatcaaaactatttgatggttttacagatatattttttggatcaatgattgacaaaacacacagtaaaatgggaaaagcgaaaccctggatgctatacggatatattggttgtgccattacgctggtcggctgctttgcagtaccggtgagtttgggaacaacggctaaatatgcatggttctttatttcttatacactgttaaatggtgtgttttatacagcaaacaatattgcttattcagcacttacgtcactgattacaaagaacagcaaagagcgtgtacagatgggatcttaccgttttatttttgcattttcaacaagtcttctgattcaggcgattacagttggatttgtagataaatgtggtggagatgctgcagcatggagaacggttgctattatctatgcaatcattggtcttgtcgtaaatacgatttcagcactttctgttaaggaacttcctgaggaagaacttaacgaaggagaagtaaaggatgataatgaaaagtacggaatggtacatgcattcaagcttcttgtcaaaaacaaatattacatgatgatttgtggaacatatattttacagcagttatatggtgccatgattggagctggcatttattacatgacatgggtactgaaaaataagaatttgtttggacaatttgcatgggcagtaaatattccactgatcattgccctgattttcacaccgacattagttggtaagtggaaaggtatgtataaactgaacttaagaggttacgtcttagcagtcatcggtagagcacttgttgttgttgccggatatatgggcagtgttccgctgatgatggcatttacagctcttgcagccttaggtcagggaccatggcagggagatatgaatgcagttatcgcatcttgctctgagtacacttatcttacgcagggaaagagaattgacggaacgatgtactcttgtacttctcttggtgtaaaaatcggtggaggtattggaaccgctgttgttggatggatgcttgagttcagtggatatgtcggaacaaatgcaactcagccacagtctgcacttgatatgatgcagtttatgtatctttggcttccgttaatctttgatgtattgattatgtttgtactttcaagaatgaatgtagaagatgcaaataaaaaactgaaagcagaaaaaggaattgctgcagatgaagtaacagatgcatcagacataaattagaattgacaggagaaagcgttgtctggtcattgctcgatgagacagtgcttttttctatatataaagtgattgaactgtattttgaaaataaaaaaggaccacttcatttttgtgaaatggccttaagaaaatattcagttttcacaaaatagtccttttagtatttatacatggtaaggatgctcaaaatattcagcgtagaatactaaaaggtcattcagatatttttttaggttgctcatttgcaattcctcctttccttatttacaagttgattataagataggtgtaaaaggattgcttgccaaatcgaaagaagatatagacaaatgttgcaaaggggagtatttcatgcagttaaaatatgttgacacaaaagaggagattatagcaataaataggaagtcaaaacatattgaaccacatcttcataatgcactggagatcgtttgtgtaacaagtggagcattagaacttggtgttggacaggaactataccatatggaaaaaggagatataggctttgtatttccggatgttattcatcactatcaggtactgacacccggtgtaaataaagcgacttatctgattgcatcgccatttacgatagccaaatttgcagatatcatgcaatccatggctcctgaatacccaatcatcaaagcggaaaaggttgaaccggaggtatatagggttataaatgcaattttagagacagaacagtcggatattactgttgcacaggcatatcttcaaattgtgttggcacgctgcataggaaaattaaatttggtagaaaagagcagtgtggggagcaacgatcttatttaccagacagtttcctatatatcagcaaatttcaagaagaagttttcgctggaagagatggcaaaagatctgggggtgagcaaatatgttttatccagactcttttccgaaacattccatagaaactttaatcaatatcttaacgatgcaaggctgaactatgcatgccatcgtttggaaaatacgagtgattctattacaaacatttgtctggatagtggatttgaaagtcagagaacatttaaccgagtatttaaagaaagatataaaatatcaccgagtgattatcggagtatttgtgtgaaagagatgttgtcataaaaggttccgttgatagaaatatttactttgatttcacggtactatgtatttgattttatgtgtggatgatataatataaaaatatttgtagaaaatagcgctttattttattatgaaaagagcaaggtgtattctaaagaaacaagaaaggcagggcgcatatgaacatgagaaaatccataatcgattttaatgaaaaaaaaggattcatctgtgatatggatggtgtgatctatcatggatcagatattgccaggtgttccagaattcattcagtggttgcatgatgaaaagaaagaatatttatttttgacaaataatagtggatatacaccacgggaattaaatcagaaactggcaaggatgggacttgatgtgccagaagaacatttttacaccagcgcattggcaacagccgcttttttaaaggaacaggcggcaggctgttcagcatttgtgataggagaagccggcctgttaaatgcactttatgatgttggcattacaatgaatgatgtaaatccggattatgttgttgtgggagagggacgctcctattcattggatacattaacaaaagcaacgaatttagttctgaaaggtgcaaagctgatcggagcaaactcagatgtctccggaccgattgagaacggcattgctcctgcttgtcgtgcattgattgcacctatagaaatggcaacaggtacacaggcatatttctgtgggaaaccgaatccactgatgatgagaacaggattgaatatgcttggatgtcattcagcagaagctgtaatggttggggatcgtatggatacagatgtgatttcaggaatggaaagtggtatgtctactgtattggttctctctggatgttcaacgaaggatacactcaaaacttatgcttatcttccgacaatggtattgaatggagtgggagatatcgccagtatggcaaaaacaaaagaggaatagtgttcgataacttgaaaattttgtaggaatgatgacaggacattttgataataaggatcaatttaataagctgcaggcagaagggaaaatataactatatgcggaacatgtaaatacaatctgtaatgacaaaataaataaccttcctgaagatttcaaaggaaaatttgttgttgaagagagctattatgaaattaatgggaaacgtcatgcatctccacatcttttccttatcacggaaatagaacagggaattttgctttcttcttatgaaattccaaaaggagaagataaaaatacattttcataggattctatgaagaatgttgattactctaaactagaaaaatctgaaaaatttactccggcactttatcatggaaaggacggaatctgggaaggaggcagcacaagccagttctctccggtaatgacattcaaactttgggaaaagttttccaataatttataagcgtgtataatcaaaggtttgcatattgggatgaaattcagtttgtttgtaaaaaagccttgaaagcaggtagaaaggctggcggagtgtctttagctgatgttcgggttgatattaaaacaacgattgatgaagctatgaatagcactgccccagaggtgcaggcaaatttcaaaaagtattttggaaaaaaacgccctacgccagagaaatacatttataccattacgaaaaagacaacggtaaaattataataaaagggtcgtgaaaatgcttcacagaattgtgatctgcattatcacgactcttttactctctgtttactttcaaaactgtaagtgtaattgaatactgcccttgctataatttaattgtattccaagcataaattagagattgacccatctgcaggcagtgtagtacaggatatttttaagatgaagctgcagggaatgagtcaggattcgatcgctaatcgtttaaatgaactgggtattctttccccatttgagtataaaataagcagcggcagtcgttatgaaacaggtttccggcagaaagaacaggcactttggagttccgttacggtccgcaggatactggaaaacgaggtttatatcgggaaccttgtacagggaaaaaggacaacaccaaaccataaagtgaagcagacttatgtaaagccggaagatgactggatccggattgagaaaaatcatgaaccactggtgagtgaccgtgattttgaaatcgttcagaggcttctgggcatggatacacgtacttcacccgaccaaaagcaggtatatctgttatccggaattgctgtatgtgcggattgtggagcacctatgacaagaaaagtttctactgtggcaggaaaaaaatatgcttattatttatgttccacaaataaagaaacaaaacgctgttacagtcatagaataccggaaaaggatctggaagatgccgtactggtgatgctgaaacagcatatccagaatatcctgcacatgaaaagagtcctggaatttgttggtactgtgccatttcaggagatcaatttgaagaagctgcagaacatttgaaaagtatattttctatgtatatggatggcaggaactatagtgatattgcaagacagctcaataaagatggagttttatcgccgactttacagagaaaattctataaaaccggtgaaaagccgcttccggagtcaaaaccctggaacaattatgaagtgaaacgagttcttcaggatgttcattgcacaggtgattctgtatttggaaaatatcagcaaagtgttttccagggaaataaacagagaaatcgaccagagagtgaatgggtgcatgtggagaacacgcatgaagggattatagatagagagttgtttcaacaggtacaatctaaaatccaggaatatacggaagcttataagaagaaacatcagcagaacaatggggctattcgaaatcataatttttatatagggaaaatatggtgcggaggttgtggcaaccgcatgacgttgtccagagaaagaaatggcacattcttttatatctgcggagccaatactaaccataaatccggaggaaagcaatgcaaagggcacagagtcagaaaagaatatttggatgacgatgttcttcgcctaatccaaacgcatatgaaaaccgtattggatacagaaaaaatgattcaggaaatgaatgcagcttccaaaaaccagacacagtacctgcttttggataaagaagtggggaaacttcgacgggaactaagccgaatcagtaagcgtaaatcggatttatatgaagattactcggaacgtttgattacggaagaagagtacatacagttttctcggatctattccaatgaaattgagaatatcaagagccgtctggacacagtattagcggcacaggttcgttattcccaggattaccacatcgaagaaggctggggaaatgtgatacatacttatatgtcaaagcgtaagctgacaaaagaaatggcagatgcctttgtggattcaattattatccatggtaagtatgattatgagatcaagctggtatatgacgatcagtttgcagatttacagaaattaaagaaagagaaggaggcgcagtcaagatgacagatcatagaaaaacagctgtttacatccgtttatccgcagaagatgacaatgtagatggcagagccaaaaaagagagcgacagtgtaacttctcagagaattctgttaaaatcatttgtgattgatcagttgggtgttgctgaggcagatatcctggaatatgtggatgacggtgtcagcggtactcattttaaaaggcagggatttcaacagctgcaggatgacatgaaaagcggagaaatcggctgtgtagttgtaaaagacttttccagattcggaagagactatctggaagttggattttatattgaatatatttttccacttttacagattcgatttatttcgattaatgacagctatgacagtgcggcgagcagcggaatgactggtggaatgaatgtagcattgcagaatctggtatacaatatgtatagtctggatttgtccaagaaaatttcatcagcattgcagacaagaacgagaaatggtacacgccttctggtaaatgccagatatggctataaaaaaggaaaagatggaaggctggaagttgattcggaggctgcaaaagtcgtgaaaatgatttttaagatggcagcagagggaacaagttttgcagatattacaagggaattgaacagacaggcgattgccacttgtgatgagcagaaattatcaagaggggatcaggtgcagttccagaggtttgacacgatcaaaaagaaacactggagtgctacgacagtagcggcaattgtccgggatgagatttatattggaacaagaatctggggcaaaacacgttgcagtatgcatactggccataaagcagttctgaatgatgaaacagaatgggttcgtctggaaaaccatcatacggcaattataaacagggaattgtttaaaaaagcaaatgaaatgcatccgaaaaaacggagaattgttgcagaatcacgcaccaattttactctggaaagacgtaaaaaacagccggcattgctgatatgtgctaactgtgggcattctctgttaaaagaaacagagcatctgctgaaatgttcagatgcccgaaccaatggaaatcctgtgtgccgaagtttggtgatccgtagggaaccgatggaggagaatatcctaggacttgtccatcagtatgcagcgtcattgttggaaaaagaaaagaaagcatcttccaaaagtcaatgcgaatataaagagatcaatactgcagaattgcaaaaacagagccgacaattgacttcagaaaagatgaaactctatgatgattacaaagatggtcgtatggatcgtgatttgtataagcagagagctgaaaagataagtggacagctggatgaaatcaaacgaaaaatagaagatgccgagaatagcaaaaagcttcttgaacaaaatgaactttctgataaaataaaactaaaagatttcttgggaattcagaagttcgatacagagaagctgcgtgagattatcaaggtgatccgtgttcatagtcagaatgaaattgaaatcgaatggaattttgacgatattttttcagaacagagataacttgagcaggacgagaatgacttatcaaaagataatagaggtgctgggactacctgatgggagcgtcagatagtcttcggcagaaaaaaataaaattttttttgtcctatacttgacacatccacatgtttgcagacatacgtattgctctaatatggctaagtccggaatgaatcctaaagtgctccaatatctgatgggacattcagatatcagtgtcactctcaacacctatacacatcttaaattggatgatgcgatagaagaagtagagaagcttgcacgtatgcaggcagaggcaaatgaagagtttagacacatggggttgaaggatgatataccaacaaagaatggtggcagaaagcttggctaagaccatataaagactgaagacttcagaattttattgccgatttctgaaagggaaaatcaaggttgtaaaaggatgaaatgtagcatacagagctaagctgtggtctaaaaatggtctaaatacattttggagcaatcatagagatttggatctaaaatagtaaaatatgagtattatcagccattggtggtcagcaaatgtttcataacatttgccgaaaatgccgaaatatagataggatgggcactggttgcaggttttgaaaaaatttgattctaaaaagaccggaaatagaccagaaaaagccaatggtctaaacttgaaaaaatagtccattttagaccaatatttagaccagttggtggaataaatataccgagataagccaaaataagccgagaaacagaaaaatggtcgatagactgaaaatgtgcgcaaagccccataaaataaggaaaaaccgagaaaatccaagataagataggagttaaaaatatatgatacgagtgcttttcatttgccacggcaatatctgccgcagcaccatgtcccagtttgtattccaggacatgatcaaccaaaaaggtctcaccgaccagttttacattaattcagcggctaccagccgggaggaaatcggaaatggtccccattatgggacggtaaataagatgaaacaggttggaattccggttcttccacacagggcggttcagatgacaaaaaaggattatcgggagtatgattatctgatcggcatggacgaggccaatatccgaaatatgatgcggattgcaggcggcgatccggaggggaagattcatatgctgcttgattacagtgattcaccaagagccattgcggatccatggtatacaggaaattttgatatcacatatgatgatgttgtggaaggatgtactgctttttttaattatctggaggaaagtggcagtattttttgattgaaatagtgcgaaatcaatcatgtgcggagagtgaggactgttgtattatggtacaggccgctgaggtctgtcagagaatataataaaatagttatttggtacttccggagggagaatttgtcgatgaaaaattctttacatccgccagcattgcttatatactgatagcagagcagctcttttgggaatcaaatcccagtctattttcttagctgtaaaggagtaacatcaaacagtacatatatagaggctgcagagtgtgcatataagagcaagcagcttctatagataggctgtaacagggattagaaataaaaattttatgtaattttcccaatgtgcttatttacagttcttaaaacgtaatcaggcctaagtggtcttattaccgtatctaatcaatttcatgggtgtttcgcccgggctaacaggaaagaatgaggagtataaatgcaggaaggttatgaatgtttcatagaggactttcgccagaggcttctggaggcaacaggatttggagcagacagaatttattataagaaaaaggaagagtatccggttacaccgggggaccgattgtttataaagcggagggaagccggagagattgcggagatctgtgctttgtatatttcagatctttatgaagaatattgtcagggagcagagatagatgagcttctcggtgatgttatgaaacggctggaaagtttttcgagaacagacattgctaaaaatgttaaacttctgaatgattatgaaaagataaaaaaagaactttttatcaggcttgtaaatgtacagaggaataaaagtgatctggaagacgctgtgtgcagagtcctgggagatattgcaatggttctctatgtgaaaatgggagaaatggaacattatatgaccagtatgaaaattaagcggcatatgataaaacactggaacagggacggggataagatatttgaagaagctcttttgaatacgtatttgatttctccgccaagaatttactgctgggaaaaaatgatttttgatccaagatatgacggggaaaattttatgaatatactcgcagattatccaattagaaaggatgccataggaaattgcctgagtacagtaaaaaggacaaatggtgcagttgcagtctttcttccgggggtagcggagcgactggcaaatctttttcaggggaatttttatgtagtatttacaagtatacatgaagtgatgattcataatgcagccactgcagatccggaagatcttcgcagggttctggaggatactgtaagagataccacgccggaagaggactttctgacactgaatatttatttttatgacagagataccggtttgttcagcctttatcaggcacaggaagcagaagaacgctgatactttagaatggcagagaaaatgcgatagttctggtagaaagataacgcagaggaaaagtctgcatatactgttataaaaggaatatcagggggaaacacctttgacatataaaattgtacttgacgcaggacacggcggaggtgatccgggagctgtctatcagggaagacaggagaaggatgacacgctcagactcaccatggctgtaggagaaattctggaaagaaacggaattgatgtggtgtataccagaacggaggatatatatcagacgccgtttgaaaaagcaaaacttgcaaatgaatccggggcagattattttatttcttttcacagaaacagcagtccaagagataatcagtatcagggcgctgaggttctggtatatgaccgcagtggaataaaatatgagatggctgaaaatatacttggagcgttgggggaggttggattccgtgagataggtgttaaggaacgtcccggtctggtagtattaaggaggacaaaaatgcctgcacttctggtcgaagcaggatttttgaatacggattcagataacgagctttttgaccagcagtttgatgatacggcagatgccatagccggagcgatacttggtacactgacgggagaaacgatagaagatcctctttattatcgtgttcagacagggattttcagaaaccgggaaaatgcagacagaatgctgtatcagctgatggaacagggatatccgtcttttatcctagaggaaaacggtctttataaagtgcagacgggtgcttttcagcagataggaaatgcagtggatatggaacagagattgcgcgatgcaggatatagtactataattgtaacaaaataaatgttaaggttcattttgtttatagcaagggggtgtaatttattccggcatgcttgtgaataagatgagctttgataaggaagtttcagttttttgctataaatgagcaaatatcgaaatttgcacaatagaatccgtaacatacagacataaagggaatattaagctttatatgtgcatcttataaagacaaattcgtgatgattttgtgtactttttcaaatttgctcattcatagttttttgtaaattacggtcagatacctggtgtgttcgtaaagtataaacatgacaaaataaatattacaaacgaacaaatgataaattttgtacaatatagtttttaatgagtaaacactgaaattttgcataaaaaattgtaatgtacagatataaaggaagtgtcagagtttatatgggaattatacagagataaacagatggacccttatttgattttagaaaatgtacatttacagaagagtacgtgaggaagaggaaagataaactatataaagataaacggaagagtttttgcagaatttccggaaagtaaattgatagataaaaaccttggagtgggaggagagtacaaatgatagagtatgagaaatttttgcaggaattggaaacatttatttttgtggaaaataaaccggagaaagtggatattatttttgttccgggaaatggatatccgcagatggcagagcaggcagctatattatataaggaagggattgcttcctgcattcttccaagtggaagatatagtgttacactgggaaaatttgtgggggttcaggcaaaatctgataaatactatgaagattatcatacagaatgggactttctgaaagatgttcttgtaaaaaacggagtaaaggaaaatgatattttaaaagaagatcgtgctacttttacctgggaaaatgcaaaatattccagaatggttacagacagtaacgaaatatctgtaaaaaaagctattatatgctgcaaaacctatcatgccagaagggcactgatgtattatcagaaggcatacccggaaactgaatttctggtatgtccttctgaagtggatggaatcaatcgcagaaactggaaaaatacagaagaaggaattctggcagtcacaggggaggctacaagaatcataaaccagttttctttgatgatggagtagggaaaaaggactgagttatatcaggttttttttctgcatagcagtcggaaactatatgtagaatttataaagactaaatatcgaattttacacaataaaatcagtaatatacggatataaaaaacattaagttctatatgtgcatcttacaaagaaagatttgtaatgagtttgtgctctttttttattaatttgctcatttatagtttatagcctgcaaataaaaagtaattgattttatgtcaagtactttatatagcagaatcaggtatgtgcaagagaaaaattctatttgtgcaagactaaattctgtcgcggatacagtgtggaatttaagtttatagtttgcctcattttataacgcattttataacactgaaaaaattatattttaggggtgtcgaaaaaaacagaactatgatataatacctatgtcgtaatgtgaaatattctgttacgaaatatttacaaaaacataaaaatctgatatattaaaaatgaatgaaaacaggaaatctgttacaaacagattttgattattatatagataaaactaatgattatatattgatgttgataatagatgaggtgtaataatgaaaaaaaataacggtaagagaaatgtacagtttttggcagcagcggcgttaacagcagctttaatggcagggcagattcagccggcagcagtttacggaagtgaaaacattcaggtcagcagcctgattccggataatgtgactgtggaacagccggtacccctttctgagatttctcttccatccagtgaatatggtactttatcctgggcagacgagtcaagtgtgccgtcagaacgcgtacagtcttacgatgttgtttttcgtccctataatgcagcagatctttcaaaaatctcaggctgggacggaagctctgatgtgatctacagcagtgtgagagtagtagtgagcggtattgaagaaaatgaatcccaggaagaggaatggtctgaggagaataatggagaagcttccgaggatcagaatgacagccagtgggaagaagaaaacagcggcacgggagagaatgacagtcaggaatcagaagatcacagcactggatccacagacgaagatgctggagagtccaatccagatggacaggaaaatgacggaacagaggaggattctcagcagaacagtaatggtgattctgcagacaaaggcaacaatgaatctagcggaaacagccagacagagggcagccagcaggatggagacagcgattctgcagaagagaataacagccaggaatcggaggatcagaatgccggttctaaggatgaagatgccagtgacttcaatggaaacggtgagacagaagaggagtcacagcaggatggagacagcaatcctgcagaaggagaatctcaggataatgccggagataaagaggacatgccggaagcaggggaaaaaccggagccaactgtaactccggaggcaactgtgactccggaagtatcagtgacaccggaaccaactgtaaccccggaagcagataaggataatatttttgaacaggaagatcagaaagaccagcgtccgtcagatctggaagaaaatcttacagaagaagaaaaggaagagttggctgctgcaaatcataccagcaacgggatttctgtgtctggaatcaatctgccatggtatgttcagttcagagcaaccagcggagaggattaccagtttacaaatgaaaacgaggccaatctgtttaaatcctatgaatttgagctttgggatctgagaaacaatacagaatatgaaattccggacggagagtatatcagtgtgacagttccggtaaaagcaggttatacatacactattgagcatcttctggacagtggggcaatggaaacgattgttcccagtgtggaaggaagtactatggtattcagcacccattctttcagcccctttggtattgcaggaagtaaaccgcttgtaggaggagaaattcaggaagatggatacggggatttagtaccggttgcaacagtaacacctaccgcttctgcaggagtaacagcagttccggaaaaggatgacagcagcagtgtacagaagccacaggatgacagtaaggattctgataaacagacaaatacatcagaggacagcagtaaagaagctgaagaaaatgatggcagttccaaatctgcggtgaatacaggagacaacacaatgatcgcaccttttataattctgggtgtggtagctattgtggtagtaggcgtgattatttacttcagaaagaaaaaataaattatagtaaggcataagaaaaaagccctcccatataatgttatggggagggcttttttatgaaaacaaaaactgttttaagatcattgtttcttgcatatggcctgacaggcgtctgccttctgcttctggcattcctggtatttcagtttgatctgggactggcgccggtatcagcgggaattgtggcagtgtatgtaatctcctgtctggcagggggctttatggcaggaaaaatcatgcgaaaggataaatatttttgggggattttagtaggtcttgcatattttatacttcttgttttggtatcctttgccgcagaaggaaagtgggatatgtcttttcagcatttgctgactactttttgtatgtgcctgggcggaggggctcttggaggcatgcttgcataacctaaaaaaagacttttatttgagagaattttatgctatactatgcccagacaattatatatacataaggaggatatacaatggagcatatcaaaacattaaatacaaaaaatctgcagaacacagttaaaaaaggtggatgtggtgagtgccagacttcctgccagtcagcatgtaaaacttcctgtactgtaggaaatcagagctgcgagcataaataaggcggagttcagggaagtcagttaagcagcgggtgagtccgctgcttattctttttatttaccgggaaagcagtgtattttgtactaatttccctagtaaataaaatattctgcgggaatgtaaccggatgcacgaggaatataagcgttcatggctgtctgcatctggccagaaaagcagagtaagtctctcagggattgagagatttagggcgttccaagcggctccgtccgctttgttcgcagaaaagtgttttataaactgtaaatgaaaaagagtgcaaaactcagtatttactcatttatggttgaacagataaaagtgtacagaaagcagacagatatgcttgaaataaaaaagcggatctgggaggctgagtgtacagtccctgagaatataagaggacagggaacctgcagaaaaagttcacctgacttctgaagtgagttcaggacagatgaaatctgtcctggatttttcaggtataatttacaggaaaggatttcaaaaaaatgagtctgattcacagataccagagcaatggatataatattgttcttgacattaacagtggatgtattcacctggtagaccttgtaacctatgaggtcctgccatgcatggagaacgagctgtcaacagaagaaatcgtggaaaggctgaaagacagattcagcccggaggagatcagaacttctgtttcggaatgtgaaaagctgaaagaagaaggaatgctttttaccagagatatttatgaaagtgcaattgatgagttttcaaaaaacagccgtccggttgtaaaagcactttgtctgcatattgcccatgactgtaatcttgcctgccgctactgttttgcggaggagggagaatatcatggaagaagagccctgatgtcctttgaggttggaaaaaaggccctggattttctgattgccaattccggctccagaagaaacctggaggtggatttttttggcggcgagccgctgatgaactggcaggtggtaaaagatctggtgaaatatggaagagagcaggaaaagcttcataataagaaattccgctttacacttacaaccaacggcgttcttcttgatgatgaggtaatggaattctgcaatcgcgaaatgtccaatgttgttctcagtgtagacggccgtaaagaggtacacgactatatgagaccgttccgcaagggcgccggaagctatgatctgatcatgccgaaattccagaaatttgcggaatccagaaatcaggacaactattatgtaagaggaacttttactcaccataatcttgatttttcaaaggatgttcttcatcttgcggatcttggatttaaacagatctctgttgaaccggtagtggctccggatgaagaagagtatgcgatccgcaaagaagatattcctcagattctggatgaatacgatgcgcttgcaaaagacatgatcaaacgggaaaaagaaggaaaaggctttaatttcttccattttatgattgatcttacaggcggtccctgtgtgtataagcgtctttccggatgcggttcaggaacagagtacctggcagtgactccgtggggagatttttatccctgtcatcagtttgtgggtgaagaagaattcctgatgggtaatgttgatgagggaattaccagaccccagatccgtgaagagtttaagggctgtaatgtttatacaaaggatgactgcaaggactgttttgccagattttactgcagcggaggctgtgcagccaacgcatatcatttccagaaggatgtaaagggcagctatgagatcggatgcgagcttcagagaaagcgtgtggagtgcgcgatcatgatcaaggctgcgcttgcagaataagtgtttataaaaaatgtccgacagtcactgacggacggaagggctgcaaatgagaagcaggttatcggctttttatgcggatgagaagtccgggaaaggaagcaggaatacctgttgctttatcactatgcagcttaagaaacaggatggataatcccttaccggctgtaagggatattacccataaatacattgtggtagaagggaagaacaatgaagaaaaaaagaggagtcattgtactggtcctgactgcgatcattacggtttttctgtgctatactgcagctgtcggcctgggtccgacaggaaccggagcggcaaaaaatattaaaaccggtcttgatctgtcaggcggtgtaagtattacttacgaggcaaaagataaaaacccaagcaaggaagatatgtcagatactgtttataaaatgcagaagcgtgtggaacagtacagtactgaggcgcaggcatatcaggaaggcgacaaccgtattacagtggaaattcccggtgtaacagatgcggacaagatcctcaatgatcttggaaaaccgggctctctgtgttttattgaacagacagacaaggatggaaatcagaactttgttgccggtgaaaaaaattacgaactcacaagaagtcttgatgagatcagagaagccggttctgtagttctggaaggtacggatgttgcggacgcagaaggcggtacttaccagaatgaaaacggagcaagagaatatgcggtaagcctgaagcttacaaaagaaggcaaaaagaaatttgccgaggcaacagaggcaaatgtaggaaagcagattgcaattgtgtatgacaacgctgttttaagcgcacctacggtacaggaagccattacaggcggacaggcagagattaatggaatggatggggtagaggaggcgcagaaccttgcgtcctatatccgtatcggttccctgagcctggaactggaagaactgcgttccagtgtagttgcagcgcagctgggagaagaagcgatcactacaagtgtagttgcaggagcaatcggtcttgtgatcgtgatcctgtttatgatctttgcatacagaatccccggtctggtggcagcaatcgctttgatcctttatactgcgatcgagctgatcactctgaatgcttttgacattacactgacacttcccggtattgccggtatcatcctgggtattggtatggctgtggatgccaacgttattatctatgcccgtatccgtgaggaaatcgcatcaggttcttctgtaagaacagccatcaagtccggattcagcaaagcgttttctgccattattgacggtaatgttacaactctgatcgcggcgctggtactgatgtggatgggctccggaacagtaaaaggatttgcctatacactggcgctgggtattgtagtatccatgttcacggcgctggtcgtatcaagactgatcgtaaatgctctgtatgcggtaggtattcaggatgaaaaattctacggaagagcaaagaagagaaaatgcatcaattttgttggaaagaaaaatattttctttattatttctctgattctgattcttgtgggaccggtatccatgatgatccatcagaaaacagatggaagcattctgaattacagtctggaattttccggcggaactgcaactacagttacctttaatgaggatatggatattaaacagatcgactcagaggtaacacctgttgtagaaaaggtaacaggagataagaatgtacagcctaccaaggttgtgggaacaaatcaggtgattattaagacacgcgcactgtcccagccggaaagagaaaagctcaatcaggcaatggttgacaactttgacgtagatgaagctctgatctctacagaaagtatttcttctactgtaagttctgaaatgagacaggatgcttttgtagccgttgttgttgcgactctgtgtatgctggcatatatctggatccgttttaaggacatccgttttgcaagcagtgcagtattggctcttgtacatgacgttcttgttgtgtttgccttttatgcacttgcgcgtatctctgttggaaatacctttattgcatgtatgctgacgattgtcggttacagtatcaatgcaacaattgttatttttgaccgtatccgcgaaaaccttaagaaaatgggaagccgcgcagatcttacagagatcgttaatgacagtatcactcagacacttaccagaagtatttatacctctctgacaacctttgttatggtagcagtgctttatattatgggagtttcttccatccgtgaatttgcactgcctctgatggtaggtattgtctgcggagcttattcttctgtttgtattacaggctctctgtggcttgtaatgaaacgtggctttggcaaaaacaaagtccaggcgatcgcttcaaagaatgtggctgcggaaaataaaaatacagctcagacatccggacagaagtctgataacggacagaaacagccgaaaaagaaaaatcgtaaaagagtagcagaacgtcttgcggctcaggaagcggaaaagaacgcagaagaaaataaaacagaataaaacaggattgtcccggggcagcaggctgtctcgggatgtgtttttacaggagaaaaaaatggaaaaatgggtagtaacagcaaaaaaagcagactttcagaaaatcgggcagacctttggcattgatccggtgatcgcacgtctgatcaggaacagagatgtggaaggtatggaaaatatccgctcgtatctgtacggaacgctggaagagcttccttctccgtggtttttaaaagatatgaaaaaagctgtggagatcctgaaagacaagattgatcagaaagccaggatcaggatcatcggggattatgatattgacggagtaactgccacttatattcttcttacgggatttcgccgtcttggggcaagggtggatacctatattccggacagaataaaggacggatacggaatgcacagtcagctgatcgaaaaggcggcagaggacggaatcgatacgatcattacctgtgacaacggaattgcagcgtctgcggaaattcagcaggcaaaggaaaagggtatgacagtgattgtaacggatcatcatgaaatcccttatcgagacacggataaggggagggaatggattgttcctgaagcagatgcagtgatcaatccgaaacagtcgggctgtccatatccaaacaaaaatatctgtggagccgtggttgcatggaaactgatctgggctctttatgagacatatggaattgacagaaatgagatcctggaattttctgaaccggcagcggtggcaactgtgggagacgtgatggatcttcagggggaaaaccgcattattgtaaaggaagggctgagaaggcttccaactacaaagaatcagggatttcgcgctctcattgaggcaaacggcctgggaggtgaacggatcacagcctatcatgtgggatttgtgctgggaccatgtatcaatgcaagcggaaggctggacactgcggcccgggctttgcggcttctttgtacagaggatgcggacagagcggcgaaggaggccggggatctggttgcattaaaccagagcagaaaagccatgacagaaaaaggcagggaagaggcagagcacatcattgaaagtcagggcctttcctcagaccgggttctggtagtgtatctgccggaatgccatgaaagcctggcggggatcattgctggaaggctgagggaaaaatattataagccttcatttgttctgacaaaggcagaaaagggagccaagggcagcggccgctccattgaagcctattccatgtatgacgagctggttaagtgcagtgatcttctggaacagtttggcggtcatcccatggcggcaggactgtctctggcagaagaaaatatcgacgcattccgaaaaaggctgaatgaggtatgtacgctgacggaggaggagcttgtgcctaaggtggtgatcgatgttccgatgccgatttcttatctgtccagaacgctgacggagcagctgtctgttctggaaccttttggcaaaggaaattcaaagcctctgtttgcccagaagggacttcgtgttttaaatctgagaatttttggaaagaatcagaatgtggcaaaaatgtgtctgatggacggacagggaaattctgtagatgcagtatattttggagcagcgaaagaatttgaacagtatgtacagcagaaagagctgatttccgtgacgtattatccggagatcaacgtctatcagggaagagaaagtctccaggcggtaatccgcaattacttttaactgcagtaggaaactgtggagagcggttcatatggcgtgggtttacgctgtgaacggagcgaacagcagcggtatttggcgagacttgtcgggttttggattgattccataaaaaaaaagtgatatactgatttagacttatattatagaaaaaaggcggaggtgcgggattatgaagaaaattgaggattatgtaagaagtattccggattttccggaaccgggcattatttttcgtgatgtaacaagtattctgcaggatgcggacggactgaaactggcaattgattccatgcaggaatgtctgaaggacacagaggtggatgtgatcgttggaacagagtcaagaggatttatgttcggagttcccatcgcatacaatcttcataagccatttgtaccggtacgtaaaaaaggtaagcttccatgtgagacagtatccagaagctatgatctggaatatggaagcgcaaccatagaaatgcacagagattccatcaaaccaggacagaaggttgcggtgatcgatgatctgatcgctacaggaggtacggttgaggcggctgtgaagcttattgaagagcttggcggagaggttgtcaaaattgtatttcttatggaacttgccgggctgaaaggccgtgagaaactggctggctatgatgtggcttctgtgatccgatacgaagggaaataaccacagacggagcgtacgacggctgctaaagaagaacaggcagcagaatatcagacaggtgggagagaatgacagaaagaaataaaaatatacaaacggaaaaaagtccgggtgctgtagatcaggcaaaaattgaatccgtgaaaaaggcagatgcagcggtaaaatccatgagtgattttacaagtccggaagttctgtatcaggaattgatcaccagtgtgagaaaataccatccgtctacggatatttccatgatacagaaagcctacgaggtagcaagagaggctcataaggatcagaaaagaaaatccggggagccctatatcatccatccgctctgtgtgggaatcattcttgcagatctggagctggataaagagacgatcgttgcgggacttcttcatgatgcggtagaggacacctggatgacctatgaagaggtagaaaaggaattcggttccgaggttgctcttctggtggacggagttaccaagctgggacagctgaattattccaaggacaaggtggagcttcaggcagaaaatttaagaaaaatgtttcttgccatggcaaaggatatcagagtaattctgatcaagcttgcggaccgtctccacaatatgcgtactctgcagtacatgcgtccggaaaagcagcaggaaaaggccagggagaccatggatatttatgcgcccattgccatgcgccttggtatatcgaagatcaaggtggaactggatgatctttcgcttaaatacctgaagccggatgtgtactacgatctggtagacaaggtttccctgaaaaaaagtgaacgacaggattttgtcaacgggattgtgaaacaggtaaagcagcatatggaggatgcggggatccaggctcaggtggacggacggatcaagcatttcttcagcatctataaaaaaatggtcaatcagggcaagaccattgatcagatctatgatctttttgcagtcaggatcctggtggacaatgtaaaggactgctatgcggctctgggagtgatccacgaaatgtacaaaccgattcccggccgttttaaagactatattgccatgccgaagcctaatatgtaccagtctcttcatacgactctgatcggaccaagcggacagccttttgagattcagatccgtacctatgaaatgcataaaacagcagaatatggtattgcggcgcactggaaatataaggagtcctcggacggaaaggtacctgtaggaaaaagtgaagaggaaaaactgaactggctgagacagatcctggaatggcagagagatatgtctgataaccgggaatttatgagccttttgaaaaacgatctggatctttttgcagacagtgtttactgtttcactcctcagggggatgtgaaaaaccttccggcaggatccacgcctattgattttgcctactgtgtgcacagtgcagtaggaaaccgtatggtaggcgccagggtaaacggcaagcttgttcccattgaatatgagatccagaacggtgacagaattgagatcatcacatcacagaattcccagggaccaagccgcgactggctgaaaatggtaaaaagcactcaggcaaaaaacaagatcaatcagtggttcaaaaaggaactgaaggaagacaatattttaaagggcaaggacatgctggctcagtatgccaaatccaaaggctacaagatcggtacctacagcaagagtcagtatcttgaggcagttatgcgcaaatacggtttccgcgactgggattccgttctggctgccatcggacacggagggctgaaagaaggccaggtctttaacaagctgatggaggcttacgaaaaagagcatgccaaaaagatcacggatcaggatgttctggatgctgccacagatgctcatgaaaagcttcatctggtaaaatccaagggcggaattgttgtccgtggcatccatgatgttgcagttcgtttttcaaaatgctgcagtcccattcccggcgacgagattgtgggatttgttacaagaggacggggaatcaccattcaccgtacagactgtgtaaatattcttaatatgtcagaaaccgacaggacaaggctcattgaggctgagtggcaggcagataccagagcttcggaaaaatatatggcagagcttaagatctttgccaacaaccgtaccggacttctggtagacctttcaaaaatatttacagagcgtaagattgatgtaaaaaatatgaactgccgtacaagcaagcaggataaggcgaccattgccgtaagctttgaggtaggcagcaaagaggagctggcgtctcttgtagaaaaaatccgccaggtggaaagtgtgatcgatgtggagcgtaccacaggctgatcagtcataaaaatacagggacagagaaagaggggaccgatatgaaaaactcagagcttcagacatgcgttcttggttctgtatcaacgaactgctatctgctgaaaaacaaaaacacaggggagcttctgatcgtggatccggcggatcatgcacaggaaatcttttccagaataagggaaatgcaggcgaagcctgctgcaattcttttaacccatggtcattatgaccacattcttgcagtggaggacgtaaaaaaagaataccagattccggtttatgcctgtgaaaaagaagcagggactcttctggatccttccgcaaatctgtccggatacggaaaccgctcctgttccctgaaggcagatatacttcttgaagaccttcaggcttttgaggcggcgggcttttccgttcagatgcttcacacacccggacacactccgggaagctgctgctattatctgaaggatgaaggaatcctgttcagcggggatacgctgttttatggttctgtgggaagaaccgattttccgggaggaagcacggctcaaattgtggaaagccttcacagacttacagattctcttcctgaggaaacagaagtttatcccggacacgatatttcaaccactatcggttatgaaaagaggtacaatccatttgtataagatcagtattctgtttgacaacaaagaatttgaacatgatatttatgagctgatccgagccttttacccggaggctgaaattgcagtttcctatgaagaggaagacggggcaaatacagcggatcttctgttccgggtggaaaagcaggagcagagttttataatccggtatcaaaatgaaagcaataccggggtgacaagtgcagagatcataaaggggcactcttcggatgatgcccctctttcctgtacggaagaaaaagatgcagccagacagcagcgcaaggagcagaaggatgttctgaaatactcattatataaacttctgacaaagcttacaggaaagacccttccatggggaaatcttacagggatccggccggcaaagcttgccatggcaatgattgaagccggaatgaaaaattcagagattgcagaagaaatgcggaaacgttatctggtaagtcctgaaaaaacagctcttgccattaccattgccaaccgggaaagagaaattctgaaagatattgattatgaaaacggatacagcctttatgtggggattcctttctgtccgagtatctgtctttactgttctttcagctcctatcctctgaagcagtggaaggacagagtggagctttatctggatgcgctctgtaaggaaatccgggaagtttcttctattatgaagaaaaaaggacgtaagctggatacggtttatattggcggcggaacgccgactaccctggagccggatcagcttcagagacttctggataccctgacggaacattttgactgcagaaacctggctgagtttaccattgaagcaggaagaccggacagcattaccagagaaaagcttcaggtgatccggaaatatccggtaagcaggatttccgtgaatcctcagactatgaatcaggagactctggagattatcggaagacgccatactgcggaggagacaaggcaggccttttatcttgcacgggaatgtggttttgacaatatcaatatggatctgatcgttggacttccgggcgaagatctgaaaaaggtacagtataccctggatgaaattaaaaggatggctccggacagtattacggttcattctcttgcggtaaaaagggcggcaaggctgaatatttttaaagataaatatcaggaaatgacctttgaaaataatcaggaaatcatggaaatgaccatgaaaacagcctgcgaaatgggaatgggtccttattatctgtacagacagaaaaatatgaagggcaattttgaaaatgtaggttatgcagaggttgacaaagccgggatttacaatatactaattatggaagagaaacagcccattattgcactgggagcaggcggatcttcaaagctggtatttgatcatggagcgaggatcgagcgtgtggagaatgtgaaggatgtatggaattatattacccgtattgatgaaatgattgaaagaaaacgggtggctgttgaccgatggctttaaggacaggaggtgtgcagattgagtgcggcgcaggcagacgcagaaaagacagcagacagaatactggattttgacctttcagcagagctgaatcatgggattgttgtcagcaaccttgcgtatgcggtggcttccgagctggggctggagcaggagagctgttatgagcttgctgttgcgggaatgcttcacgatatcggcaagctgaagctgacagaatacatcaacggacgcgaaagggatcctcttctgatcgaggagctaaaatatgtgcgtatgcattctactctgggctatgaggaattaaaagaccaggggtattcagagtttgttctggaaagtattctctatcatcatgagaattatgacggaaccggatatcccgataatctcattggagatcagatccccattggagccaggatcttgagagtgtgcgatgtatttgcagcgcttacatctgacaggccatacaggactgcgtttgatgttgcaactgtaatggagcttatgatcgatgagatcaaaaattttgatatggaagtttttcttgcatttcagagaattatacataataaataacaggaggcaggcatggcattaaagaaaaaaccagtaaccggtatgaaggatattttaccgaaggaaatggaaatccgaaactatgtaatgaatatgatccgggaaacctatgggaaattcggattttcttctattgaaactccctgtgtggagcatattgaaaacctcagcagcaagcagggcggcgaaaatgagaaactgatttttaagatcctgaaaagaggagaaaagctgaagctggaaagcgcaaaggaggaagcggatcttgtggattccggacttcgctatgatctgacagtgcctctttccagatattattccaatcatgccaatgagcttcctgctccttttaaggcgctgcagatgggaaatgtatggagagcagaccgccctcagagaggccgtttccgtcagtttatgcagtgtgatattgatattttaggagagcctacttatctggctgaaattgagcttgtgctggcaaccacaacacttctgggcaaactggattttcataattttaccatcaggatcaatgaccgtaaaattctgaaggcaatggctcagtacagcggattcccggcagaaagctttgataccgtgtttattatccttgacaagatggacaagatcggtcttgagggagtttccgaagagctggaaaaagaaggctttgcaagagaaagcattgacacgtatcttggcatgttccgtgagatcacctctgatatccagggtgtgcgctacattaaagaaaagctgaaggatgttcttgatccaaaggttgcagaggatctggaaaccattatcgcttctgtggacgcggtaaagagcacggactttaagatttcctttgaccctacgctggtgcggggaatgtcctattatacaggtccgatctttgagatcgcaatggatgaattcggcggttctgtaggcggcggcggacgttatgacgagatgatcggcaaatttacaggacagaacacaagcgcctgcggattttctattggatttgaaagaattgtcatgctgcttctggaaagaggctatgaggttccgggaaccggcgaaaagaaggcgtatctcattgaaaagaacatgcctgcagacaagcttctgacaattctgaagcaggctgaagaggaaagaagaaatggaactcaggtaaccatttctattatgaagaaaaataaaaaattccagaaagaacagatgatgacagaaggctatactgaattcgttgagtttttcagggataaattataaaaaggagtaagatcatggctgaaagtatgaagggactgcacagaacctgccgctgtgcggaagtaacaaaagagatgacaggcagcagagtgactctgatgggatgggtgcagaaagccagaaacaaaggcggacttgtatttgttgatctgagagaccgttccggaatcatgcaggtgatttttgaaaacggaagtattgatgaagaaggttttgagaaagccggaaagctgagaagtgaatttgtgatcgcagttaccggtattgtagaaaaacgaggcggggccgtaaatgaaaaccttgccacaggagagctggagcttcgtgccaatgagcttcgtgtactttccgagtcagaggttcctcctttcccaatagaggaaaacagcaaaacaaaggatgagatccgtttaaaataccgttatctggatctgagaagaccggatatccagagaaatcttatgatgaaaagccaggttgccactctcaccagaaaattctttgcagaagaaggttttctggaggtggagactccgatccttggaaagagtacaccggaaggcgccagagattacctggttccgtctagagttcatccgggcagcttttacggactgccgcagtctccgcagctttacaagcagcttcttatgtgttccggatatgaccgttatatccagatcgcgcgctgcttccgtgatgaagatcttcgtgcggaccgtcagccggagtttacccagatcgatatggaactgtcctttgtggatgtagacgatgtcattgatgtaaatgaaagatatcttgcatacctgtttaaagaggttctggatgtggatgttcagcttccgatccagcgtatcacctggcaggaagccatggaccgttttggttctgacaagccggacatgcgtttcggaatggagcttcatgatgtcagcgaaacagtaaaggactgtgagtttgtggtatttaagggcgctcttgaagcaggcggaactgtccgcggaatcaacgcagagggacagggatccatgcccagaaagaaaatcgacaagcttgtggaatttgcaaagggatatggcgcaaaaggtctcgcctatattgctattgcagaagacggatcaagaaagtcctcttttgccaaattcatgaaggaagaagagatggacgctcttgttcaggcgatggaaggaaagccgggagacctgcttctttttgccgctgataagaacaaagtagtttatgatgtgcttggcgctctccgtgtggagcttgcaaaacagatggagcttctggataagaacgagtatcgttttgtgtgggtaacagaattcccgcttcttgagtggagcgaagaggagaaccgctttactgccatgcatcatccgtttaccatgcctatggaagaggatcttccgcttctggatacagatccgggcaaggttcgtgcaaaagcgtatgacattgtactgaatggaaatgagatcggtggaggaagtgtgagaatccatcagaatgatattcaggaaaaaatgtttgaaaagcttggatttacggaagaatctgcttatgaacagttcggattccttctgaatgcctttaaatacggtgttccgcctcatgcaggactggcttacggacttgaccgcctggttatgctgatgacaaaggttgacagcatccgtgaagtgatcgctttcccgaaagtgaaagatgcgtcctgccttatgacacagtctccaagcgttgtcagtgaagcgcagttacaggaactgggacttgagactgctccggagaaaacagaagaataagatacagtcagatgactgtaaaataagaaaagggcttttccgttttgggaaagcccttttagctctataacagatcaattttcttcagaaatattttcgccggaggaatcaggattctcctcagggttttcttccggggaaagctcttcttccacaggagtactgctgagagtgccaaagattccggctccgatcacctgcccgtcatcctgcagcttccaggaagcaccgtcgttggtaagagaaaagcttgccgggtgcgtcagtgttttggtattattttctatgcttttcagaagaagctccagagaatgattatatcgtttctgagaaccgtcgatgactgcctgtggagacgcaagatattcttccagttctttctgataagcagtaagaattgcattgctgtcaaaggtagtgatctcggcttctacggcagcctgatagctttttatctgagaagaggttattttaaaatcaaagtttttatgcatttgttccaccagagcgctggcaatggaagcttttgcatcatctgaagtattcagaaggctttccagaccaagatagttgctcatctgatccagatccatagttttcagggtgtttaaatagacggtcagtgtttcctccggcgtcaggaggtcactgtcagagagataagtgataagaccgccgacaagactgttttccagttcatgagtacgtctgatttcccattcttcttccttttctgtaccctggttgctaagggtcagggagcagctggtttctacagttttatactgattatttttcagaagttcactgaggatgagataacggtcctccagggaaccggaattttcttctgtattctgagaagaggaagctgcggcaagcaggattgcgttttcaagatgagaaaccgcgtaatcttttgcgagagcctgagcgtcaatggtggtgagcttcaggtttgcagaagcttctttcttgtctttggcaactttgatacgttggattttgtagtcaaaatcctcgaaaaaaagagaaaaaacatcttcaacttccttggaaagttcggttttttctgtggcatccggaaacagctcctgataggaaatatacttctgagccgtatcagaatccagatttttcaggagatccagttcatttgtaatgactccctccacatctgacttatctgagtgggaacagccgatgatcattgatacggcaaagataagcacgagaagcggaatcagaccttttgcgatcttcatatgattctttcctttccaaaatattcccctccattttaccagataacagggtaaaagtcaaaaaaacggaaattaggtgtaatttttctaaaaaagaatgaaaaaactgtgaaaccacaggtgatttttgtcaggacttttcttttaaagcgtaatctgctatgatagtacagtcagatagttcgttgctgtgaaggtcgtgaacagtaatgatagttcctttgtttacagggaggtaaaaataaaaaatatgaaaaaacgtattttgatccttttggggattcttataattggtggcgctgcaggaggagtctgctggaacctgggatttttcgggcaggagcaggaaagcggagaaaccgcctatgttacagagatcagccagatcaccggagacgttgcgggaatcgcaaacaggtatgccggtgttgtggaaccgcagaaaacagaagaggtagagctggaaaacggacgtaaagtaaaaacagtgaaagtaaagaccggcgaggaggtaaagcagggacagcttctttttgaatatgatcttaccagtatccaggaggatctggaggagacccagcttgatcttgaccgtctgaaaaatgaagccgccagtctgagcgaacagatcgccactcttgaaaaagaaaaaaagcaggcggaaaaagacgaccagctctcttataccattgagatcgaaacaaataaaatgaatctcaaaaaaaatgaatacagtcagaaaagcaagcaggcggagattacgaagctccagaatacaatgggaaatacagaagtacgaagtcctattgacggagtgatccagaagatcgataccacaaagcttacaacagatgacagcggcatggacgatatggatcaggatatgagctattctgatactggtatgacaggagaaagcagtcagaatgcttttattaccattctcagtacgggagcatacaggatcaaaggaacggttaatgagatgaacgtaggaagcattatcgaaggagaacctgtgatcatccgttcccgtgtggacgaaaaccaggtatggaagggaaccatgggaagtgttgacagagaaagcaccaattcccagagcagcagcaacgcatggggaatgatggatgcaagcggcgactcccagacatcctccactacatatcctttttatgtggaactgcagtcctctgagggcctgatgcttgggcagcatgtatacattgagccggatgagggacaggaggagaaaaaagaaggcctgtggatcagtgaattttatattgtggatgcagacaccaacagtccttatgtatgggcggcagacaaggataagcgcctggtaaagaaaagcgtgatcctgggacagtatgatgaaactctgggtgaatatgaaatcgtagagggacttaccaaaaaagactgcattgcctatccttcccagctttatgaggagggaatgaaaacaacgaccaacagcgcggctgctacggactttactgctctggaaatggagaataccggaaatggagatgagggagcgcagccggcagaagcgcctgtggaggaaattccggcagacgacggttcggcagagataccggagacagtgtcagaagagatttctgctgatgatatccctgcagaggaagttacggaagaggagagtatttcttcagacatgggaagcggcatggaggattctatggtagaaatggttccggatacgtctcttcctgagaatgaagttctggttccggcaggcgatgaataacaggaggaatggaatgattcttgaattaaaaggaatttataaagattacattcagggaaagatgacggttcctgttctgaaagatgtgaatttttccatggaggaaggcgaatatgtggcgatcatggggccttcgggttccggaaaaacaacgctgatgaacattatcggatgtctggatcaggctacgaagggcagcttttttctggacgggcaggatatccgttcctgttcggaaaacgccatgtcggatatcaggctgaataagatcggctttgtgttccagagctttcatctgcttccaaggcagtctgctcttgcaaatgtggagatgccgctgaattatgcaaaggtgccaaaaaaggaacgccgggaaagagcgctgaaagcattggacagagtagggctttcagacagagtggatttccggcccaatcagctttccggaggccagatgcagcgagtagctatcgcaagagcaattgtaaacagccccaagcttcttctggcagatgagcctaccggtgctctggacagcaaatcaggcgctcaggtaatggaactttttcagaagctgaatgacgagggtgtaacggttctgatgatcacacatgatccggatattgccgcccatgcaaaacgggtagtgacgatccgcgatggtgtgcttcaggaaaaagaggtgaaatcatgaaaaatgccaaaaagatcatcataggtgttgttgtggtggctctggtggcaggaggtgctgcgggtggagcagtttatctaaaaagtaataacaaagagacagtaggcgtagtcagtgtggacagcctggcctctgattattatatggacgataccactctggatggaaatattgttacaaatgtgacacagaatgtaacggtggataaagatatgatcatcaaggatctgtatgttcagaaaggcgacaccgtaaaaaaaggagacaagctgatgtcctttgacatgactcttgtccagatggaactgaatattgcaaagttaaaaaaacagaagcaggagcaggatctggaaaaagctgtcaacaggctgaacagcctgaagaacggggggcccattgaggaagaggacagccggcttccggatctgccgacggacaacagtacatctgatactgagatggcctcggcagcaggaaacgtaaacggaagctatctggcagccataatcagaccgattctggctgctgcagatgtggggcttgtgacagaagatgatttttcttccggtgattctgataccggagctgatcaggaagacaccggtgcacagccggattccggcgatcagggagtttccggtgacgacagctttgttgattttggagacggaaatcaggaacagatcacaccggatccttctgcgacaccttcaccggaaccgcttccttctgaagcaccggatgaagaatttacagataccccttcagacaatgacattgagatcattgatccggaaccggacagtcacgaaagcgacattacagacggtgaaccggagttttatcagaagctagatgcagatacggttccttttacaggaacaggtacagaggaagatccttttgtatttctctgcagctcagccaaaggaaaagtcgttgccaccggaggatttttaaacaaaatggcaggctttaaggcggatggaacaaaggaaccgggaatcaatggatactggtatcagctggaatttcatcagaatgacacgatcacgaattttgctgacagaaaagaatcctgcaccggctattatctgatagacggaagtcttctggaaaaaatggtagaggaaaccgcttctgtggaatatactcttgagggcgcttctcactatgaagatgattttgagattcccggcggcggagacgatatgggcggcagcgatccaggtgtgaccatttccagagaagaggccattaagatccagcagacaaaggtagaaggtctgaagctggatatcagacagagcgacattgatattggcaagctggaaaaaaaggtaaacaaggaagttatttacagtaagctggacggaaccattgcaaaagtgggagatccggttacaggagtatcagacggaaatgcatttatgactataaaaagcaaagaaggctactatgtaaaaggtacggtcagcgaactgcttctggataagctccaggaggggacaattctgaactgttctggctcaaacggagtttttgatgcagaggttgtggatgtatctgagtatccggtatcggatgaggtttacggaacaggcatgggaaatccaaatgtttcttattatacttacagtgccacgatcacagataaatcagttcaggtaacagaggatgactggctgagtgttaatatccagggaggcacagataattcaggagtcattgttctggacaaagcgtttgtaagaactgaaaacggagcttattatgtatataaagaagaaaacggagtactgaaaaagcagcctctgactgttggcggaaatgcaaacggcggaatgtctgtaattgtaaaaggcggaattaccagagaagataagattgcattcccttatggaaaaacagcaaaagagggtgtaaaaacaaaagacatctctcttgaagaactgtatcagtagaaaggtggaattttatgcttgaaaatatgaggatatccattcagggaatctggtcccataaaatgcgttcctttctgaccatgctgggtatcattattggaattgcttctattattgctattgtatctacgatcaagggaacaagtgaacagattaaagaagatctgatcggttcaggaaataatacagtgacgatcagcctttattccggtgacagcggttatgatcccatgtttggaatgacggacggcggtaaacctcctcttcttacgaaagaacagaaggaagaagttatggatatggagcacgttgagaacgctacatttttccatacaagcacttacagcagtatatattatcagaatactgctctgcagggaggtacggtatacggaattgatgaaaattatctggatacctgcggatatatggtacgatccggaagaggatttattcagaaggattacgacaatctgaacaaggtagctctgattgacagcaatgcggcagagaatcttttttccggagaggatcctctgggaaaaaccattgaagtcggagacgacccttttacggttgtgggaatcgttcagcagggagacagctatcagcccaacatttcaagtcttgacgaatattattcctattatcagacggttgtcggaacagtgatgattccaagtaaatgctggcccattgcatttcagtttgacgagccggaaaacgttgtgatcaaagcagactctacagataatatgagttcagcgggaaacgatgcggctaagattttaaatcagggaatcgaagaagattccaagtttaaatacaaagctgatgatgtaatggaaaaagtcaaggatatgcagcagctcagtgaaagcacaaaccagcagcttctgtggatcgcaagtatttcccttctggtaggaggaatcggtgttatgaatattatgctggtttctgttactgagagaaccagtgagatcggtctgaaaaaggcgatcggggcaagaaaaaaagttattctttatcagtttcttacagaggcttccatgctgaccagcattggaggtgtgatcggagtgattctgggaattgttttgtccaaggtggtatcggagatctccggggcgcctacggccatcagtataccggcaatcataggatccgtactgttttctactctgatcggagtgatctttgggctcctgccttcggtaaaggctgcgaacctgaatcctattgacgcattgagaagtgaataaataaaaagaaaactgcttttctctgaagccggatttccggaaaagggaaaagcagtttttttatataaagctttcgttcataaagagtttcaatccataaagagattttgcccatagacagttttaatgcacaggaagcttcagctgaaaggtggcgcctccgccgggagtgtcggaaacactgagggttccatgatgaagaagcgcaatttcttttgcaatgcaaagtccaaggccaaaatgctgcttatcgtttcttgaggtgtcagaacggtagaatctctggaatacggcttctttttccgaatcaggaataccggggccattatcagcaacaaacagagaaacggaagccgcttcctgtctggcagaaagccggatcatgcctccttccggtacataggcaagagcattgtcgataaggattgccagagcctgagaaattttcaggctgtcacagaaacagacagggagagagtcttcaggcagctcaatgagaagctgcttttttttatgccgggcagtctgttcatatttttcgtatacatccagcagaagagtatctatttcgcaggaggtacagtccagaacccaggtgtggttatctgatctggaaagggacagcatgtcctggatcagccgggacattcgtttacattcatcaaggctgatggaaataaagtgctctgtctgttccggatccgcataggaaactgcagacaggcttgtctggatcacagtaagcggagagcggagctcatgggaagctgcggcaataaaggcattctgctcctttctgcttttttccagagggcggatcatttttcgggtaaagaaccaggaaaatacagccagcgcggaaaccgcggcaatgactgccacaagaaaagcgatccttatagttttgatctgcccggactgtgcatccagagagtaaagaagaacggtattcaggacgccgccgtttttgggaatcctggctgtgcaggcataataccccggaagctggaacatgactatctttgacagagtctgagaggtctggccactgtcaagattcagtccgtgattttctgcagactctttttttgccagatcaaagatcttccgcatgttgtcctggccgtggagctgctcaaaaaacagcggggtatttccgtcatagatctgcatatctatgccgtaattgctttctgcctgctggatccatcggtgagacaggacgttctgactttccagatgagaaacacaggaataggcattgttggtaaatactgtataatgcttctggcgaatgttgctttctgtaatgataaggcaggcagaagccagaagaacaagaatggttcctgtaataaaggtagaaaacagtgtcatatggatgtgaagtttccggaacatgacagcctccttaataatgtgattttatggacattatagaaatatttttcgcaggatatagaagaaaacaggaaaaatacagctggtcttacatctatcatagcacaaaaatgcctgcgagagatacagagattattgcacccaatccttaaaataatctctaaagttattaaagcctgatctgaaaatagagagtgtttagaggttgccatattaaaataaggaaaaatgaaattatatgggagggtgagaaatgaaatactggagaaaaagaatcgtatatatgatggctattatgctgtcagcaggagggattgccggaagtatgggaagtgagattgttctggcagaagagaaagaaacagtgaaaggacggtatgcggagcagaagctttcccttcctgaagagaactgtaaggcagtgattgatatctgttttctggaagacggaactatgcgtattgcttaccgggacagtgaggcaaagctgaaaacagcagattcaaaggatcagggaaaaagctgggagacgccccgggatctgtgggaggaatttggaaaaagtgaaaaagcagagccgatgacggtgaatctttccaaagacggaggaattttcagcagctggaattgtctggaaggagagaatacttttctggcagtttacctttcagcggaaggaaccaaaaaagagtttgatcttacccagatgccggaaggacagggatatgtgtataaaagtcagttcagtccttcgggaaatattctgctgatgggagataagtttttatgtgagattagcagggaggacggcagactgatccgaacctatgaaagtggaggctatgttacagattttggaattgcaggaaatcagcttcttgtttttgcagatgacacgatacattattataatgcaaaaacaggagatccccttccggaggaaacagtgtttacagaacatctccagatggaaagtggggaaaatacagaggaagttgtttcatccagagtatttacaggaatgggagagcaaggcattctctatgtaagcaaaaaagggatttacgtatataatttgggcggttctgttgtggaacagcttttaagcgaaggctatctgaccgggatttcttcaaaaacagagctgatggacgtggaaacagatgcagatggaaacatttacctggcagtttcagaccgctactcagataatcccacaggaatgcttttaaagtacgggtatgataaagaacaggaagcggttcctggcacagagcttgatatttatatgctgaaaagagacactcatatggagcagatgatttccttgttccagaaagaatatccggatatcagtgtaacggttcaggagggaatgacgggagaggatggggttactgccacagatgccatgaaaaacctgaatacagagatcatgtcaggagagggaccggacgtgttgcttatggacaatctggatgcagaaaattatattgagaggggaatgcttgaggatatcagcggaataatggaaaaagcagggatcctggagaatattcagaaggcctatgaggaagaggacggaagtatttactgtatgcctgtgagattcggcattcctattttggcagggggttccggagagattgacaatgcagtgaatcttgaaaaaattgcagatatgacggaaaagtacgaaaatcaatattcagattccttttttccggcctatcagaccagatggccgggagtaatgcttcgcttctttggcgagatttctgcctcagaatggatgaaaaaagacagaaccctggatgcggaaaaagtaaaagatttttttcaacaggtaaacaggatttatcaggcaggacagaaggcaggcaacgcatctttggacagtacctatgagtatgcggaaaaaatggaaagaatttatgacaaaaatcgaagagaggagtcttccctcaattcatatctggtgccttgtgcagacgggcaggcgcttttctcctatggctatctgttttctctggaagaactgttcttattaactaccatcgaaaagcagaattcggatatcagtcacaggctgttaaacggtcaggctgaaaactgtttttctccggagatgattatggggatcagtgtgaaagcaagggaaaaggaggcagcagaattatttgtcagttttctgttcagcgaggagcagcagaaaaataacaaagaagccggatttcctgtaagaaaatctgtttatgacagtgaagaatactgggagcttggacaggaaggaaatatagaatacggattcagttcggcttataatggcgagagtcatgatatgataacagtagttcattcggcagacgatcagataaaggaaatacagaagttaggaaagacccttacgatgccctcaggaggaagccggatcatccaggattctgttctggaagccggaaaacgttatctgtacgggggaacagatctggataaagcggtagagcaggccgtgtctcaggtaaagctttacctggcagaataaatccttagaggttgttttaagataaggctgatatgatgtgaaatcataagagaacggaatgagtcataaggatgaaagtctgagatgaatttcgtgaaaggatatgccgggtcgcttaataaagcagggtactgcggatattgagttttgtggccgcggcaaaataaaaagaactgttcacagattaccggaaacggagtgaacagtcacaaataataaacaggaggacataaaatgcgacatcagatatggaaaaagggaacagcgctgacagcggcttttgctctggcggttgtgccggcacttgcaggttgcggctcagaacaaaaggaaaaagccgcggattccggaaagtccggtgaacaggataaagaaaaaaaggagatggcaatgggcagatatctggaagaggatgtgactcttccggagggatgcggagatattgcagatatgacaatgcttgaggacggaagccttcgggtctgctatatcagaagtggggaaggagccttttatacagattcttccgatggaggaaaaacctggggggagacaaagaaccttgcagagcttctggggatcgatccggaaaaatatacggtttcctatccgaagctgggagcaaacggaggcatttttcttaccatttatcctttttccgaaaacgtggaagaaatgtcttattactacatttctcctgacggaaccaatcagaaaatggatatcggcaaagagctttccagcggatatgttgcagatgcaagattcacacataataatacggtcattattaatgattttggcacagcgcttgtggaaatcagtctggatgacggaagcattgtccgtaaatatgaggaaggaggaacggtcagctgctttgcagtacttggaaagcatctgatcgccgtgacagataccactcttcactattataatctggaaacaggggaaccccttgaggatgagacggctcttacagaacagattacttctgatgagacaaaccttcagctgacaagtacaagctcttttcctatggtgtttacagaaggggacgaggaggacagtattttttatacagatgataaaggcatgtaccggtattcctttggcggcagtgtggtagaacaggtgattgacggaaatctcaaccggatatcctcaccggacatttctctggtctccatggtaagggataaagacgggaacttttatctggcggttcaggacagctctgaagatatgggaaggacaggaaagattctgaaatatgcatattcaccggatacccctgcaacaccggatacagagctgacggtctattctcttacagataacacttatatccgacaggtagcagccctgttccagaaaaagtatccggatatttatctgaatctggagatcggcattacggacgaagaagccgtgaccagtacagacgccctgaaaaatctgaacacagagatcatggcaggaaatggtccggatgttcttgtaatggatggcattccttcagacacctatgtggaaaaaggcatgctgaaggacatcagcggtattcttgataaaattgaggaagaggacggtattcttgacaacatccgtgagagctatgtgcaggaggacggaagccagtatgtcatgccggtgagatttggaattcccatgcttcagggacagggagaggatgtaactgctgttacagaccttgcatccatggcagatactctggaaaaatatcagagtgaatattctgaaatgcatatgccgatgtctcttcttgtgggaggggcagatacgtttatcagacagtttgcagatgtgaatgctcctgcatggctgaaggaggacggaaccctggatgaagctgctgtgacagaatatctggagcaggcaaaccgtatctatcagaccggaaagaccggaattgacgcgctgaaggctcagggctttgccgtatattctattggagaaagaaatatgatgtctgatatatcagcctctgcaatcagcgtactgggaggatattacaagctttcagtcggaaggctgctgtctccggacgggcttgcctttctgtacagtgcagaacaggaagaaacgaatctgacacacagtctctggaacggacaggcacagaactgctttatcccggaacagacagtgggaatcagcgctaaagcagcagaacctgaggcagcagaaaagctggtagagtttctgttcagtaaagaaggtcaggaaacaggcgcaagtgaaggcttcccggtaaatgaagcggtttatgacagtgaggagtactgggcagtgggagatgaaaacggaaatctgggaactcttggatctggaaatgtagaaacaggcgaatatatagagtttgatattgtaagagcagatgaagaaaccacaaagcgcgttcaggagcttggaaaaactctgactcagccgtcagaacagaatgaaatcatactggaggcagttgcttcaaacggcagcagatatctggaaggcgagatcagccttgaggaggcggcaaaaggggcgatccagcaggtaaatctgtatctgtctgaataaccggcaggcggctgcatgacctggataaatgatattcagacagctttattgatgaggggacaaagataaaaaagcggcggttatcttgcagccggaatccaggaagaggaatccggaaagagataactgccgtttctgatgtgcattggattgaatggataaatgaatggatatgagagaaaaccggacagatgacaagataaaatcagtagggctggggatatgctactgaaaaacttccagctggtatcccacaccccggacagtttttatctgcagggagctttctacggttttcagcctccggcgcagaaaatgaatataattgtcaaggtttccttcctccacatctgagtcaagtccccagactcttgtaagaagaagctggcggggaagtgtctgtccgggattgcggagaaatacttccataaggtctccctcccggctggaaagggtacagtcctttttgccgctggaaaggcggcgggtttccggtataaaagtaacgtctccgagagaaactgcgtcagcagcaggattataggcggcaggacggcgcagaagacagcggattctggcaagaagctcttcaaaggcaaagggctttaccatatagtcgtcagctccgcagttcagtccggtaaggcggtcgttcagctccccaagggccgtaaggatgataaccggggttttgatctgacgggagcgggcttccttcagaacttcaattccgttcatatgagggagcatccggtccaggatcacaaggtcgtagggtgtttcctgcatgtaataaaggccttcttccccgtcatggcagagagtgacagagaagccttcctgctccagacggaaggaaacagcagagcacagctcccggtcatcttcgatcattaaaatattcatatgtttacctctcgttgtttcggaaatttgcatcagcctgcagagaaatgcttacagtctgatgctatccagttattctaacaaagtattctgtaaacttcctttaaaaataaaaacccccttagagtttttttaaagaatgtcctgttacacttgttttatcgttactgtttatggtgttcacagcggccggacaaaatggattcaaattactttcggtgatggaagtctgtcctgtacattctgagaacagtaacattttatcatcattggggagaacaaaaaagtgactggatcaaaaaaaataaaaaaaagagaatataagggattcttatttctgcttccaagctttgctggtgtgtgtctgttctgggtgatcccgtatctggacgtgatcaggcgctcttttttcagcgcaatcagcggagaatttacaggcctgaaaaattacagcacaatttttgagaaccaggcctttcgtctggcggcagggaatacgcttcgtttttttcttgtgtgtattcctctcctggtagtgctgtctcttatgatcgctgttcttcttaccagaagaaaaaaaagcatgcaggcgctgaaaagtatgttccttctgccaatggcaattcctgtggcttctgtagttcttttgtggaaagttctgtttcacgatcagggtcttctgaaccattttctggaaactctttcccttcagggcgtggactggatgaatacggacgcttccttctgggtgctggtagtaagctatctgtggagaaatctgggatacgatattgttctgtgggtggcagggcttggagccattccaactgctctttatgaggctgcaagggtggacggagcaggagagtggaaatgctttataaaaatcactcttccaaatctcctgccttctctttttaccattgtggtactgtctctgttaaacggttttaaagtgttccgggaggcgtatctggtggcaggagactatcctcaggacagtatgtatcttttgcagcacctttttaacaactggtaccgggatctttccctggataaaatggcggctgcggcagtggtaacaggagcggcgattctcatcctgattctgtttcttcagaaagcctgggcgagggaggatacattatgacaaaaaaacttctgacaggtctggttttctgtatggcattgactgcagtgtttcccatattgtttcttatctgcggttcttttatgggcaatatggaaatcagagagcttcttatgccggttcttggaaatatggagggctttgcttcctggaaactgatgccccagtatcctactatgatgcattatgtggagcttcttcttgactccccggaattttttgtaatgttctggaattccgtaaagcttacagcagcgattctggcaggtcagcttctggtgggaactccggcggcatggggatttgcaagataccagtttccgggtaaaaaaattttatttactatttatattgcgcttatgatgatgccttttcaggtgatgatgctcagcaactatcttgttctggatcagatgaggcttctggacactatggcagggattattttgccggcagtgttttccacctttccggtgtttctgatgtaccgtttttttcaggggcttccggaagcaattatggattctgccagaattgatggcgcaggagagctgaggatctttttcagaatcggaataccgctgggatctcctggaatgatctcggctctggttctggggtttctggaatactggaatcttattgaacagcctatggcttttttaaaaacaaaggaaaaatggccgttgtctttgtatcttccgaatatcagtacagaacaggcgggaaccgcctttgcggcatctgttcttgttctgattccggcagtgctggtatttctggcaggtcaggattatctggaacagggaattgtttctacggcagttaaggagtaaaaagaaatgaagcgggaaaaattattaaaatggtttgcagcgttttttgcggcaatgcttgtatttacatttttgtcaaaggcggcagattccgtcagtgttgcaaaggtactggcgttagcgcctcagaatcagctgatcagccatacagtatcgggaacaggaaaaatagaaagtacaaaggagacggctgtttttgtccaggaaggaattaagatcgctcaggtccatgtaaaggcaggagaagcggtaaaaaaaggacagccgctgatgactttactggaaagtagtatccaggaaagcattgacaaaaaaaaggacgagatccaggaggcttctctgaagatcagcgatatccagagccagaaaaacattgatgcccagaaacgggaaaattcctcccgctgggcacagcaggatcttgatacagctctgggaaacggggacattaacatttccaatgcccagaatgagctgaatattgcccagcagaggcttgcagagtacagacagaaaaaagcagaggctcagaagcagcaggaactggagcagcagtcccagggatcggattttggagacgggggagagggacagactgatttttcagacggaagcaatcttcctcaggagcccattatttccgaagaggatacacaggagcaggctcttgcagacgatgtccgggcaaaaacagaggcgctgaatcaggtgatcatgagccggaatcaggaagtgaccactgcagacagggcaaaacaggaggcagcgcttccggcgcctcaggacagcacagaggaaacccttcagacacagcttgacaatctgaatgaagagctggaaaagctgaatgttctgatgcagagtaaaggggagatcacagctccggcagacggcgtggtaaaaacagtttccgctcagaccggcgggcagacagttcaggatgcggcagcagttctctatgaactgacagggggattaagtatgacaggaacgatcacaaaggacgatctggaatacgtttccgcagggtcgtctgtgcatctggagggcaacagcaaaacggttgtggaaaatgcggtggttcagtcggttcaggaagattctgcgaatccgggaacatatatccttactgtggacgttccccaaagtgggctgagcgtaggggaaagcgtggattttacggtgcagaaggaggaaggaccttatgcctgctgtgtgccgctttctgcactttacgggcagaaaggccaggaatatgtacttgttcttgacaccagagactctgtgctgggagaggtacaggttgccagaaaggttcctgttacagtcatagaaaaaaatgagacaactgcagctcttcaggaaggaacgctttcaggttctcagaagattattacagaaacagacagagagatcgcagacggcagccgggtaaggctgcaggaatcatgagttcaggtaagcggacgtttcaagggatttcctggaaatgtctgcttccgggagcgctggcactgtttttttatgcaggcgcagtgctggcatttggcagtatgatggaagagccttctgtttctgtgtttctgtcaggagcttacccggaagaaaaccgggcagaggagattctggaaacactggaacagacagaagcagaatcctcagcctgtttttactgggacggcggcatgatcacactgacagagccggactatggacggagtgcgcaggtgatggcagcaggaatcctgggggatggaagtctttatgataaaagaatccatggattctgggaaaaagataaagaaggctgcgtcattgacggggacacagcctggaagctttttggcaccagagaggcagaggggcgtcagcttgtatatggagaaaaaacttaccaggtccgtcaggtgctgccctggaaacagagaatgatcctgatccgcccggaggaagaaaacaccatgtataccagagtgtttctgaaaaatgagaagctgcaggattcaaagacagcagagcagtttctgatggcttatggactgaatggcacagttgtggattccggatttcttataagcgcagccagaatgcttcttctgatatttccggggatagtgatggggattctttttctgaaagcaaacagggagagaaggatttgcagaaaggaacaggccgccgccttctggatgtggacaggagcctgcgttctgattgtggctgcagccgcagtgctactctggaaaaacatggagatccctcaggagtggatcccgtccagatggtcggattttcagttctggtccgataaattcagggagctggaagaaaaggtgagactttttctcatgcttccaaagactgtggggcaggcggagaatatttcagggtttgtgaagtgcgtgggctgttcaatgggctcggcgtttattggtattctggcactgttatcgaaaagggaaagaagcaaaagaacatctgcatgagaaaatacattttaggctcccgggtatctttcggtatccgggatttgccgtttcagaaaaatgtgttaaaatatgagtggaaaatatgctttcagaagcttgtgaagcagggtttatattcaggtgagactatcgtggcaaatttttaattgagataccccaaaaagtatgttaaactgtatacagcatgtatttttcaggataaaggaaataaggagaatgcagtatgagaaaaattgccattgtaactgacagcaacagcggcattacgcaggatgagggaagaaagcttggaatctctgttctgccgatgcccttttatattaatgaggttatgtatctggaaggggttacgctttctcaggaggagttttatgagcgactgaaaaaggatgaacctatttccacctctcagccaaatccgggtgaagtctgcggactgtgggatacacttttaaaagaatacaatgagatcgtgcatattcccatgtcaagcgggctgagcgcttcctgtgaaacggccatgggacttgcccgtgattataacggcaaggttcaggttgtggataaccagaggatttctgtaactcagaagcagtctgtgatggatgcgctgacgcttgtacaggctggtaaaagcgctgcggagatccgtgagatccttgaggcagaaagacgggaatccagcatttatattacgctggaaactctgaaatatctcaaaaaaggcggacgtatcacaccggcagccgcagcgatcggtacagttctgaatctgaaaccggtactgcagatccagggagacaagctggacgcctattcaaaggtcagaggaaagaagcaggccaaaagagtgatgctgaaggccatgaaagaggatttcgacagtcgttttgcagaatatgcaaagcgcggcgaaatgtgtctggagatggcatatacgggaaatcaggaagaagcagaggaattcaaaaaagaggttcaggaaatgtttcctgattatgagatccagatggatcccctgtctttaagcgttgcctgtcatatcggacatggagctcttgcagttgcctgctcaaaaaaggttactgtctgaaaaaagaaaagaataaatacgaggagtcataagacatgaagaaactgatggaaattatggcagaggagctttcctcagcctttgaaaaagccggatatgatccggaatacggaaaggtaacagtatccaacagaccggatctctgtgagtttcagtgcaacggggcaatggcaggcgccaaggcatacaaaaaagcaccgtttatgatcgcagatgatgtggtggaatatttaaaagacagccgggtattttctgcggcagaggtagtaaaaccgggatttatcaacctgaaagtaaaagaagagttccttgcagactatctgaaggagatggcagaggatccgaaattttctgttgcccaggcagaaaatcccaaaacgatcattattgattatggcggaccaaatgtggcaaaaccacttcatgtaggtcatcttcgttcagcaatcatcggagagagcattaaaagaatcggacgttttgtaggccataaagtgatcggcgatgtacatctgggagactggggacttcagatggggctgatcatcacagaactgaaacaccgcaaaccggagctggtatattttgacgacagctatcagggggaatatcctgcagaagcgccgtttaccattggagaactggaagagatttatccctgcgccagcggaaaatccaaagaggatgaggattaccgcaacgaggctctggaggcaactcaccttctgcagcagggaaagccaggctatatggctctctggaatcatatcatgcaggtttctgtaacagaccttaaaagaaattatgataatctgaatgtttcctttgatctgtggaaaaaggaatctgacgcgcagccttatattccggatatggtccaggccatgaaggatcagggatttgcttatgaggatcagggcgctcttgttgtagatgtaaaggaagagacagacaccaaggaaatcccgccctgtatgctcttgaaatcagacggagcttccctttatacaacaacagatcttgcaaccatcgtagagcgtatgaagctttatgatccggacgagatcctttatgtagtggacaaacgccaggaacttcattttatccaggtattccgctgcgcgagaaagacaggccttgtaaaagaggacaccaggctttctttccttggcttcggtacaatgaacggaaaagacggcaagccttttaagacaagagaaggaggcgttatgcgtctggaacgtctgatcgcggatatcgaccaggaaatgtataccaagatcgtagaaaacagaagcgtaagagataaggatgccacagagacagctcagatcgtaggtctgtctgcgatcaagtacggcgatctttccaatcaggctaccaaggattacatttttgatattgaccgctttacctcttttgagggaaatacaggtccgtacattctctacacgattgtgcgtatcaaatctatcctgaaccgttatgtggaagagggaggaagccttgagggaatccagatgcttcctgcagtaaataacagccagaagaacctgatgctggagctgacaaaattcggtgcaaccgtggagaatgcttttgaggaaaaagcgccgcacaagatctgtgcatatatctacgaggtttccaatgcatttaacagcttttaccatgagacaaagattttaagtgaggaagatcaggcgcagaaggaatccttcctgaagctccttgatgtgacaaaaggtattctggagaccagtattgatcttctgggattttccgcaccggatcgtatgtaaaacattacagagatttattttttaacatccgccagagtgtgctgcggcttatgcccagccttctggcggttttttcttgtataaaaatcttgaatagattttaaatatatggtacaataagtgtatcaatacagttaatacactataagccagaagggaggaacgtcttattattatcttggattatcaggatcgcagaccgatctatgagcaggtaacagaaaaattccgtgtactgatctatcaggaggctcttccggcaggcagccgtcttccttctgtccgtcagcttgccatggagctttccatcaatcccaataccatacagagggcctatgcggagctggaacaggagggattgatctatccggttaagggcagggggaattttgtggcagatgccaatcagatattaaaaataaaaagggaggattaccgtaaagagcttcgaaaaactgtacaaaaagggcagagcctgggaatacagaagggagagctgatacaggtggtaaactcctgttatgaggaggaaggccaatgatagagataaaaaaatgcagcaagtcttttggctccgtaaaagcagtggataaagtttctcttgaaataggagaaagagaagtgtttggtctggtgggaagcaacggtgcaggaaaaagtactcttcttcgtatggcggcagggattttgaagccggatgagggggagatagagattgacggcgaaagtatatacgataatgaaaaagcaaaagcctgtattttttatatacctgacgacagttatttcccggctgattatacaccacgggatatagcagatttttacagatgttattatccgaaatttgatgtgcagagattttcaaaattcctgcggcagtttcatatggatgataaaaaacgaatcagtactttttcaaaaggaatgagaaaacagcttcttgtgctcctgggagtcagcgccggtacaaaatacctgctctgcgatgagacttttgacggtcttgatccggttatgcgccagggagtaaaaagcctttttgcatcagagatcatgggaagagaattcacaccggtgatcgcgtctcataacctcagagaactggaggatatctgcgaccatgtgggacttctgtataaaggaggaattctgctttccagagatctggaggatatgaaatttcatattcataaaatccagtgtgttctgaaagacaaagatcaggaacgtcagcttcagaaagaaatggatgtattaaagacggagcaccagggttctctgctgcttctgactgtacggggaacccgggagcagatcatggagaaaatacaggggaaaaatccccttttctgtgaaattcttcctttgactctggaagaaatttttattagtgaaacggaggtggcaggctatgaaatcaaaaatatgttcttctgaatacgtgagaactgtttccagaggaaaaagctggattcctgcgtttttgagtctggggttcttcttggcatttcctgttgcactgcttcttgtggtgggaaactggaaagcggcccggtatacgccggatcagcttcatctgctctatgagggactgtggaaagaaaagctggtctttacaggaggagcaataaccattgtggctgccataatgaacagtataaatggattcagctatgtttattcccgtaaaaaggtggatttttatcacagccttccggtaaagcgttcccggatgttctggaatcgtgtatacacggggcttttatactatcttgttccttatatgatcatggagttttttgcggtttgtataggagcggcaaaaggatttttcagtctgaagcttatggagctggctgccagacttttgcttgttcatttgcttttatactttctgttttatttcagtatagtccttgttttttgtgtgacggggaattttctcatgggagttttatgcctggcaggtatgcagttatatggaccggcattgggaatcttgatgtcattttgcgcatacggctttttcgacaccttttcttcaaactatccatatgggatttttaaagcattggaggactatgcctcgccgattactctgacggctgcgttctggcaaaaatatgaggctggacagggcgcggcactggcggctgttctgtttgttctgacattgatatttacagcggtctcttattttgcctacatacacaggccgtctgaggcagcagggaaaccaatggtgtatgggaaactggcagcagtaataaaatttatggttgttgtgccgtgcggcatgggaacaggctttgttttttatctgattcccacaagtcacgctcggaatatctggtgtgtatttggaatgatacttggaacggtacttgctcatggaatgatagaagcattgtaccaaatggattttcacgcatttttttccaaaaaggtacagctgcttgcggcggcggtccttgttacagtatgcgcactgatttaccagaaggatcttctgaattttgatgcctatattccccgtcaggaagacatcaaagcgctcaacctggatatgatgacactgtccggcgatatgacagactatgtaaaagaacaggaagacggtacattctctatagaagactctacatcctgggagaaaagagagaatgctttttccggaaaagacggaatcggagaggaaacctatgagattctgcagaaaattgttgaaaatcaggaaaacagaaagttcagatatggaggagaacagacagaagaaggaacttttcgccgtttgcagctggggtatcagcttcggtcaggcagagaagtgaagcgcagttatgtgataaatacagaagaatgcggtgagcttttgtataatctttataaagaagaaaatctgaaaaataaaacagaacaatttctggcttcagataccgcatatctggataatatttcttttatttcaggaaacggaagaggatatgatatttttcaggatcatccggaaaaacagaaaaaactgattgaggcggtaaaaacagatattcaggaagctgctccggaagatttgcttgctcttccttttgcagagcttcatataagctatatacttccggtaactgaagatatccacagtctggtcccaggagaagagaaaccggaaaaacgtgcatatggagaaataaatctttttccttcttataaaaatacgattgcggttcttaaagagacaggatatcctttaagctttgaagaaacggaaatcaaaaaagcaaagatcctctattataatgaatcgggagaagaagaaacagctgcagaatatacagaaaaagaacagcttgaagctctggtacaggcggcggctccatctttcggcacttttgcctggatagaatatgaaccggatgtagcggcaatctttcagacagaacagggggaagaatgttatgcagagttcctgaggggccgcattccggaatttatccgtcaggaaagcggaagtacggacaacagggaaggcgaactgacggagacaggaaacccggagaggacagaggttacaggaggggtcgacggacccgcagagatttctgttgagaaagaaaaaagagagggagcggatgagtaaagcagtgagactggataaatttctggcggatgccggaaagggaaccagaagcgaggtaaaaaaattcatacaaaaaggtctggtgcaggtcaacggcaggactgtgaaaaaaccggagcaaaagataacagaagaggaccgggtggagcttctgggaaatcctgtatccatggctccggagtttgtgtactacattcttcataagccggccggttacgtaagcgccacggaggacagatatgacagaacagtgatggaactgattccggaggcaagaaagggaatgtttcccgtaggacgtctggataaggatacagaaggacttcttcttatcacagatgacgggggactggctcatgagcttttatccccggcgcatcatgtggaaaaaacgtatttcgtaagagtggagggaacggtaacagaagaggacagacaaaagctggagcaggggattgatattggagaaaaaagactgacgcttccggcaaaggtgcagctttttcctcaggaagacagcgacagagaaaaggctgagcttttgcgccgggtacgcacagaaaaccttccggagagctatacagaactgcttctgaccatcagagagggaaaatttcaccaggtcaagcggatgatgaaggcagtgggaaagcccgtgatttatctgaaaaggatctccatgggaccacttactcttccggatgaactgaaaaaaggagaataccgtcctcttacagaggaagaggttcaaaaattaaaaaatacaggcggctcttcagcagaaaaacagaaaaaatgctgaaaatacagctaaaaacaggaaaaccctctttacacagagggtttttgtgtgttatactccaagagttgcaaaataatcacgcgtggagattccgatggatggtgcccatacggtgtgacggcggggtccagatagaaaatgatccgcgcggaagaatctaaccaaaaaaggagaacaaaaacatgagcgttatttcaatgaaacagcttttggaagcaggtgttcatttcggacatcagacaagaagatggaaccctaaaatggctccgtacatctacacagagagaaacggtatctatatcatcgaccttcagcagtctgtaggtatggttgacgatgcttacaatgcaatcgctgacatcgtagcaaacggcggaaacatccttttcgtaggaacaaagaaacaggctcaggatgctatcaaggttgaggcagagcgctgcggacagttctatgtaaacgagagatggcttggcggtatgcttacaaacttcaagacaatccagagccgtatcgcaagactgaaagagatcgaggctatggaggctgacggaacatttgacgtgcttcctaagaaagaagttattgaattaagaaaagagcttacaaaactgcagaaaaaccttggtggtatcaaagagatgaaacgtcttccggacgctatcttcatcgttgacccgaaaaaagagagaatctgcgtacaggaagctcatacattaggtattccgcttatcggtatctgtgatacaaactgcgatccggaagagcttgattatgtaattccgggtaatgatgacgctatccgtgccgtaaaactcatcgtttccaagatggcagacgctgttatcgaggcaaaccagggtacagctgaggctgacggcgagatcgaagcagagtctgaggagtttgctgagacagtagaagagtaattttattttattaaattattcaggttaaaaatatccaggaggaaattgagatggctattacagcagcacaggtaaaagagttaagagaaatgaccggcgccggaatgatggactgtaagaaagctcttacagctacagaaggcgatatggataaagcagtagagttccttcgcgaaaaaggacttgcaactgctcagaaaaaagcaagccgtgtagcagcagaaggtctttgcaagactgttgttgcagaggatgctaagagcgcagtagttgttgaggttaatgcagagacagacttcgtagcaaagaatgaaaaattccagagctatgttgcagacgttgccgcacaggcgcttactactacagcagctgatatcgatgctttccttgcagagacatgggcactgaataacgagcagactgtaaaagaagctcttgcagctcagatcgcagttatcggcgagaacatgaacatcagaagatttgctcaggtaaaagaagagaacggcttcgttgcttcctatacacatatgggcggaaaaatcggtgttcttgttgacgtagagacagacgttgtaaacgacgctgtaaaagagatggctaagaatgttgcaatgcagattgcagctctgaaaccacagtacactaacagctctgaagtgagcgctgattacatcgctcatgaaaaagagatccttcttgctcagatcatgaacgatccgaaagagtcccagaaaccggagaaggttatccagggtatgatcaccggacgtatcaacaaagagctgaaagaaatctgccttcttgatcaggtttacgttaaagcagaggatggaaaacagactgttgctaaatacgtagagcaggttgctaaagaaaatggcgcaaacgttgcaatcaaaggctttgttcgtttcgagaccggcgaaggaatcgagaagaaggaagaggattttgcagctgaagtagcaaaacagatgggaaactaatttatcaatcgtaggactgataaaaagcgaattaaatagcgtatttaagcggtttctggctattttgacaagtgttataaactactgtaaaatctcacaaaatatcgtgctattttgggtacagattgggtagggtattgggtaaagaaatttacccaacctcttaacgaggaatttgcttgttgtttaaaatagaaagggaacgctgtgtgtgattgagggcatattgtgtaagtgcaatatgtccttaaatttttgggaaaagtaatgtcaaagattaggaaatgtgatagaatggcagaaataaacaaattagaatttaacacgaacaagatttaattataggagtgtactcaatgtggcttttagggagtatttttatattcacatcactattaattctatacataaaatatagggttgtttttactggcgaaaaatgcaaagggaaaataatcgacattgtagaacaaaatgcaggttatgtagtaggtggtattaatgtcaaaaagcatgcttatatagtgaagattaaaaacaaaaaatatcatactgcacatggttgtatctttttgtcattgggaaagagaaatattggaaaagaaatttccgtatttaagaatgaaaaatatggaaatgaggtttttaaatgctttgattttcgtatagagattgttgctttgttagtatttttatttggcgtttttatgatctactcagccttatgataaagtcaagcaggtttcagtttgaaaagaagttatacgcaaagaaaaatttagaagttatggaggaaaccatatggaaaatttaagtgcatatagatactgtatcgctatgaaaaaaggtcgaaaaatattaaatctgattgtgggctgcttaatgattcttataagtatcattttcataaccacaactgtttttagctgtatttttatgcaggaatttgtttattacacatttttagcaatattccttataattatacccctacctctttttatttttggaattataggtattgtctcagctacaaaacgagttgaagtttataaaggaaaagtgatttatcatattggttttaaaaataaggaatatcgtatgtctgatattaaaacatcaaaaacaaaaagtgaaacatatagaacaggattagattatggaaatattgtacctacctacagttatgataaattaactgtattctatgataaaaaagggaaaaagatttttaaatttggattggcatacgataatgtagaacgactgaaagcagatgttaataatactcaaaaaagcatagcaaaacagcataacaagaactaaataaatttcagtttgtagcagacagtttttggattgactgtctgcttttccttttcaatcataattgatagtagtggtataaaatggttcatatccattgtgaaaagaccatttagaacggtgtagattgattgtaagggtagtaggagttccgttgatttggttatgttctgcttcgatttccgctaccacttcatcggtattccagtattgatatacgataacttgcaattcggtatcacgattagccccattgctgaatgacatactgttaaatacaagataatcgggtaagctaatgtaatagagaatgcctgcaagcaaaactagaataatagtggcaaataacaatttctttttcattttgacatacctctgtttctatatagttatgggaataactatatagtacctcactatatagtgaattactacataaagatttattgaatatacttttatgtagaggtgaggcaatgaagtatggacatttggaacttcacatagaagaactgctgaaagaaaaaggaattagtaagaataccatttgtaaggaattggatataccgaggtctaactttaatcgttattgcagaaatgaatttcagagattagacgcacaactaatctgtaaactgtgcagttacttggattgtggaatagaagagttgatagagtatgtgaaagaatgagagcctgtcggattgaagaaaattcgtgcaggcttttgttatgtcaagaaaaagagaaaacgtagtgaggtcaaggaacaaggcgaagccgatacgccgtagggcagtccttgacggaacgtacacagccaacagcaccatgatacagcagaggacttgaaaggtcagaaaccttgcaagtcctcttgtctgttattgggcgttgtgttttaagtaaagtgcttcttttaccacttctttttcaaatgctttgatatgacaatcatgtacttcattgtcaatatagaagcaatcgtcagtttgtgagtaggcaagtttggtaactttcggttcacaggtctttgtatcaattccataatagtaaatcgtggcggttgttaataccatgtgaatactttcaaaatctcttgtaaaaatgctatgcctgtcataatagaaaaaatcagacggacattcatagaattgggaactatcctctttcaaaaataatggcagtatgtgcattgcatttccagcacgattgacaagaacataaaagcgtggaatgagggcggcatactgggtcatcatagcaatatatatatcgtctaaattatcaaggaggtactcggagcaggagttgttataaaagacatattgcagggcattgttattttggcttgtatgttccataggtacattttgtccgtaaagccaccgcaaatctacatctaaggagtcagcaatcagttccattttatcggctttcgggttgtactgtcccgaaagataggaactgaacgcccctttgctgatacctgtatctttgactatatctacctgttttttattttttgctttcatggcaaatttaatccgttctgcgattgtattcatctgaaaaaacctctctttccatatctcgttataacttctcatatcttatcgtctaaggacactataccacaagttcagaaaaaagaaaacaaaaagtttataaaaaactaaactttgtattgcaaaacgaatgtgtctgtgctaatatacaattaagttcagaaataactgaactgaacgacgtcgtaataggaaaataaaaatatgggaaactgacctatcggttcaacggggagaaaggaacgtgtatgcagattacattgacaaaagaacaggtaaaagaagcctttggagaacttcgtttcatgggtgcggataactgttaccgttatgataaagacagtaagaagaaaacagaggaagtggaagccttgaaacttcatcttggaagcatgaaacttgggaacagcgtggatattcgcttggaagcaacggaacttccgaagattgagccttatgctgtggtggaactggaagaaccagtttatgccccttatgtgcagagagggaatttccctgtattagtggagaagattacctgtaagggtatccgccctgttccaaacaaaactatgtaggcggtcaaagttcctgccctcgttctgacgtatcaaacggcaggttgagggcggggcaatggcaacgccattgcagataaggaggtttgataaacttggaagaaagaagtggaagttttcttccagaactcccctacactaacaggggagtaatacggcagaaagaagaattaagtgctttgatagattggtgtcagataaccattaaggaagttccgttagaagcagtcatagaagatgtgttgagaatacctatggaacttatgacggtaacaggctatgaaaaagggattgcaggacatgaggttgtggcaatcttcgataatatcaaggtgctaaagccgacaggaaatgcacagtatcagggctttcagattttaatgagtggaaaaggctgtcgcaactatgaaaattttttacaactcaatgaggaaacatggtttgatttcttaaacagagtttgtcagtatcacatcaattttcctcggattgatttggcgatagacgacagaaaaccgtatttgaatattcccgatttgattatacggacaaaagagggattgctttccacaaaactaagggatatagattttcacgactcaggagaattgaaagaggaagtgtttcagagtaaaggtggcagtctttatctcggcagttcagccagtaatttacgattggtattttatgaaaagggatatgaacagaataaaaagtatggaacagagttagacgaaaattggaatagatatgaattaagatttcggcaggaaatggcagtaagtgtagtacaggaattattgagatatagagatgtggcaggactggcaatggaagtgttaaacagcaaaatacgatttttagaaaagccgacagacagcatgacaacacgaaaaaggctttatccaacctatcaagcgtgggcggaactgatgaaagatataggcaaggtgaaacttaccatgcaaccacagaagaaaagtttacaaaaggtatgggaatggttagaaaagtatgttgcaccgtctttgaaactgtttgcagaggttggaaagatagagaaaagagattatatcggtaatcttgtgaaaaatggagaaatgaatatcacacagaaacagttgtatgatgattacataaaagcaagaagattagaggaaaggggataatcgtatcgaaaaagcattattgaatttaaaggaagtaagcgaatatcttggaattggagaaacaaagacaagagaactcttgaaaagtagaaactgtccgttttccatgaagattgggtatcggtggtatgcgaacagaagattattagatacatggctagagcaacaggcaaaaagttattgaagttctgattgaaaaggaggcaaacttatagtagtatatggttaaaatcacagaagttccctttttatttatcaagacattcgattgatagaaaggatagagattatgggtaaagatttaaaagggaaagaattaggaacaggtttacgtcaaagaaaggacggtagatacgaagcaagagcaaagataaacggaatagacattaacttgtatgataatgatttgaagaaattaaaaatattgtttgaaaaggcaaaagaagaagcaagaaataatattgatatgaaacgtcagaaaataacgctgaatgaatggtttgaggaatggtttacaaattataaaattcctaatatcaaggaaacaagcgtgttccctatgcgtagcaaatattataatacgtttggaaaagaaatagggaatatgaaagtgacggatatacggaacttagatattcagcgggttattaacgatatgaataagcaagggagagcgtcttccagtatgcgagatgctttaggcagagttcgggagtgtttggagtctgcaaagaataatcgtattatagacatcaacccatgttttgaaatcaatgtaccctgggaaaataaaacagcagaaagacggttcttatcaatggcagagcaaacaagatttttgcaggaagtagagcataactggtataaagaaatgttttatattatgtttctgacaggtatgcgaattggagaagttggtggtttgaaatgggaagatatagactggaataagaaatgtatcaacattcaaaggtctttatcctgtcaatatgaaaatggagtaaagactatgcgactaacaaagcctaaaacacataattcatacagaagtattccgtttatggcagaaacagaagaaattctgttatctcaaaaagaaaaacagaacagacagaaaaaagcctatggaaatcgttggcgttcaagtggagaatttgataatttggtgtttactacttctttaggaagtccagttattcggaatgtagcagaaaaagaaattaagaaagtagtaaaagcaatcaattttcaagaagcaatagaagcggtaaaggaaaacagagagccgatagagtttaaagacctttatcctcatgcaatccgacatacattttgtagtaggtgttttgaaaaaggaatggacgctaaagtggttcaaatgcttatgggacatcagcattacagtacaacgattgacatatacactcatgtgacagaaacaaaatttgaagaagaaatagcaaagtttggtcgtgtgagtgaaaaacagaaagttcagaaaaataaaaactctacccagtgtgcataaatgagtacccaatatagcaaaataagagaaaattgctttcaatgggaatgaaaagtttctacccaaagggaaattgggtaaaacggaaaagcagaattaaggaaagcgtagaaagccttataaaatgggtatttgagaaaacagtaaataaaagttggcaaaacagatgggaaactaattttccagacaacatgaactttaaaacccttgaaaagctcagaaaatgggcattttcaagggttttttgcagtttgggagaaattcataaatcatcataaaatacccgtattttatcatcggatttgggacgaaaaaaggctgtaaaggtattgatcctttttcagaaatgctcatacaggcagtcccttactccggcagttcgttttttagattccgaatatgcatgtaaacggtattcttggaaatattcaggcggccggccaccttgatcacactgtctttcaggttaaaaattccttttttgtagagggcggttacaatttctttgtttttgttgttggtggaaatggacgtgtcgtttaaaatctggtcttttacgtcggcaagggccgtctcgatcagatcgtccacattttcggtaaaggtttctgttgtgtgcgggaagctctgcagggaattaaggtcttccgggatcatctgctggattacagttgagagtggaatattcgtataaaaattgatgcagatcattccaataatacggtttccttcaccgggaatggggatcgttgtggacttcagtatcactccgtcctgcctgcggttaaaataagaaatggcagaatgatcttttgagttttcaatttgtgagagcatgccaagagcaagatctgtgatgggagctccgatttttctgccggaatggtgaccgtttacaatctgcataacagagtgttccagagactccagattgtgcagtatgacttcatagccttctccaagatattgtcccagtccctggacaacagggatataagactgcagtatcattcgttcattttgagttaaagtaatatattcttttttcatagcgttccttttttaattatccattttttttaattataatcttctttcgtgcaatatgcaataaaaactgaaatgaaattcagtaaaaatgacatataaaaagaaacttaatttcattgactaaaaaataatttagtgatattatcaaattgaacaaaaaaataatgtgggaggaagagaaaatgttaaaagtggtgaacacattgaaagcaccggcagctattggaccatattcacagggaattatactgaaaaatattttattcagttccggacaaattccggcaagccctgagacaggggagattgtgggaactgatattacggctcaggcagagcaggtaatggaaaatgtgaaagcgattttggatgaagcaggaacctgctttgagaacgtagtaaaaaccacctgctttttaagcgatatggcagatttcgcagaatttaacaaagtatatgaaaaatattttgtgtcaaagcctgcaagatcctgtgttgcagtaaaagctttaccgaaaaacgttctctgtgaagtagaagtaattgcagaaattcagtaaacctgctttgcagattgtggaatgaatttattttggaggaatacttatgagtgggaaagcaaaaaaagtaagagagaaaaaagagaccaccctgtttctggcagtaattccgattctggcaatgatcgtactgctgggagtgggatatgcggttatgggcttaagtccggaggttctgatgctggtatcagcagcaattgcaggtgtgatcgcaatttatcttggttatacctgggatgagattatggactctatagtagccaagctcagtaaaacaatgccggcaatttttattttgatcattgttggatttatgatcggttcctggatgatcggcggaaccattccgatgatggtattttatggactgaagctgatcagcccgaaatatctggttgttacttcgtttctggttactgcgtttgtatcagtatgtaccggaacatcctggggctctgcgggaacgatcggtgttgctctgatgggcgtagcggcaggtatgggagctcctcttccgatcgtggcaggcgccattgtatccggtgcatatttcggagacaaaatgtcacctctgtctgatacaacaaaccttgcccctattgcggcaggcggaaagctttatgatcatattcagcatatgttctggacaacaggccccggatttattatctgctgcattgtttacacgatcgtaggctttacatttggcggagatcttgcggcagcaggaacaccggaaaaggttactattatttttgagacactttctcagatcttcaaatttaatccgttgatcattcttccgccgcttattgtgctttacggatctgttgccaaaaagccgaccattccgattatgctggcgtccagtgcggttgcaattttcaatgctgttactttccagaatttcagccttcaggactgctttaccgctgcgatcagcggatttaatatggatatgatccatgttgcaggatttaccacagagggactgattgaagatattcccaagcttctgcagcgaggcggtatggtttccatgctgaatactgtattgatcgcattttgcgcttatggctttgcgggaacactggcagtaaccggatcactgaatattgttctgaataaacttatgactattgtgaagtctacaggaggactgattgtttctacaattgtttcctgtatcacagcagtgtttgttacatcaaacggccagctgtccatcctgattccaggtgagatgtttaaggatacttacctgaaaaaaggtcttgagccaagaaacctttccagaacgctggaagactctgctaccgttgtagagcccattacaccatggacagcagccggtgtttacatggctacaactctgggagtttccactctggaatatcttccatgggcaattatctgttatacaggtgttatctttgccgtaatctggggattcaccggaatcggtatcaaaaagattacaaaagacagcgaatactatgatgaatatgtggctttaaataaagcggacgggattgacgtagaataaaaaatcgtgtgacagacacggctgaataggataagagaatgcgggcccggaaaggacaaagaatatgaaaattaattttgatgaatggaatgaaagaagaaatactaattgtggaaaatgggataccatggacaaaaaatatcagaaagaaggaatgctgcaccttggcgttgcggatatggatttccggtctccaaaacagatcattgacgcttttcaggacattcttgacaaaggtattttcggctatacggatttaagcgacaggttctacgaaaatatccggcagtggatgaagcagaagcaccaggctgaggttgccagagaagaaatcgtattttgcccgcgcatcaatgtttcttccagcatctgtgtggaaacatttacagaagaaatggacgaagtgatcatcaatacgcctgcctatgggcctctgtatcaggctgttgtaaagaatcaccgtaaagtagtggaaagcccgctgatactggaaaacggaagttataagatcgactttgagcatctggaatcggttgtgacagataaaacaaaaatgtttattctctgcagtcctcacaatccggtaggacgggtgtggacaagagaagaactggaagaagtgggagcgttctgcaaaaagcatgatcttcttttatttgtagatgagatccacggtgatattgttgcagagggagttacttttacaacggctcttatcttatctgagacagtgagagagaggctgatcgttgccacatccctgacaaagacctttaatgttccgggagtgatcgtttcttatatgattgttcctgatgaggagatcagaagccgcattgctcagaccattgaccgtattggtatgcataatcccactatttttgcagtggcagctgtagaacacggatatatggaatgtgaagaatggtaccggcagatgcttgcttatgtaaatgaaaatgaaacatttacacgtgagttttttgcagaacattttccggaatttgagattcttgaaagacagggaacatatcttctctggatcagttatgagaagcttggaattacagaggaagagctggaaaaatggtttctggaaaaagccaatgtttctgtttatatgggaagtgttttcggaaacgagggcagaggctttatccgtctgaatatagcaagtccaagggcaatgctgaaagaagcttatgagagaatggctgcagtttattcagagataaaataaaagatctgagacaaaaataaaaaagaggattttcaactggtatatctgtccggtgaaagatcctctttttatatatggattccgttattcaaaaatataaaatacagagtgcttcaggttgcttactacgcatctttttccatgttttttacagcagtggaaagcataagcttgattcggttcagctgatttacctcgctggcgcccgggtcgtagtcaatagcaacaatatttgcttccggatgcctgcggcggatctccttgatcacgcccttgcctacaatatggtttggcaggcagccaaagggctgaatacacacaatgttgggaacgccgccgttgatcagctccagcatttctccggtcaggaaccagccttccccggtctgatttcccggagagacaataggagaagccatttcagcaagctggcggatatccgcagaagaggaaaaatgacggctctgctccagagcttcatctgcggctttgcgaagccagtcaattcctttgattccccagttggcaactgttgcctttgatttcttaaatccaagatagtcggatttgaaattctggttaaagaaacagtagctgataaagtcgatcaggtcaggacatactgcctcggcgccttctgcctccagaagctctgccagatggttgtttgcagcaggcaggaattttaccaggatctctcctacgattccgacccgcggcctgcgttctccggtaatcgggatcatatcaaattcgtgaaccagatcacggcacatttttttgaactggctgtggctgatgcttcctccctgaaggaaagagatcaccctttgttcccatattttgtgcttccggttgacaattcccttttcctgctcataaggacgcatccggtaaacgcatttcataagaagatctccgaacaccgcaccatagcatatttttttcaccagaggaagcgtcagcttaaagcccggattgctttccagcccgctcagattcagagagatgacgggaacctgctccatatcggcttttttcagagcccgtcggataaatccgatatagttggaagcacggcagccgcctcctgtctgggtcataataactgctgttttatccagatcatatttgccggataaaagagcatccataatctgccctacaacgatcagtgaagggtagcaggcatcgttgtttacatatttcagtcccacatccacagcacctttgttgtcgtttggaagaacctccagattgtatccgcaggaattaaaggctgcctgaagaatactgaaatggaaaggcgacatctgcggacagaggatcgtataatcctttttcatttcttttgtaaaaacaactttttcaatggcagaggactggacattccgttttctgttctgcttttctttggcgcggatggctgccagaagagaacggatacggatgcgggctgcgccaagattgtttacctcgtcaatcttcagacaggtgtagatcttgccgcttccgtccaggatttcatatacctcatcggttgtaacagcatccagaccgcagccaaaggagttcaactggatcaggtcaagatcctcccttgtttttacaaagcttgcggcagcataaagccgggaatgatacatccactggtcattgacgcggatcggccgctcaatgtctgccagatgggagatggaatcctctgtgagaacagcaagtccgtagctgttaataagatccgggatgccgtgatggatttccgggtcaatgtgatagggacgtcctgccaggacaatgcccctgcgccctgtttttttcaggtattccagagtttcttcaccctttttctcaatatctctgcgggctgctgccagttcttcccaggcagcgtgaacagcgtcttttacctcctgggcgggcagttctttaaagacctctacaagacggtcagtaagcactgcctctgaggtaaaggcaagaaaaggattacgaaaatcaatttccgggttatgaagctcgtccacattgtttttgatattttccgcataggaagtgacaatagggcagttgtaatggtttacagcatccgggaactcgttgcgctcataggggatgcagggataaaaaataaattttatgccctttttcaaaagccagctgacatgtccgtgagccatttttgccggataacattcggattcactgggaatggattcaattccaagctcataaatctttctggtggaagtaggtgaaagaactacttcataattcagctttgtaaagaaagtaaaccagaaaggataattctcaaacatgttgagaacccgggggattcccactttgccccggactgctttgtccgcagacagtggctcgtaggaaaaaattcttttatatttgtattcataaaggttcggaatatgttctttgttcttctccttgccgattccgcgctcgcatcggtttccgctgacaaactgacgtcctccgctgaatttgttgatggtaagacggcagttattggtacagccccggcagtttgccatagaggttgtatatttcagggaattgattttttcaataggaagcatggtggtttctttgccttcctcatagcgctctctggcgatcagagcagcgccaaaggcgcccatgattcctgcaatatccggacggattgcatgacagtcggcaattttttcaaagcttctgagaaccgcatcattataaaaggttccgccctgcaccacaatgtgttttccaagctcagaggcatcggaaaccttgattaccttataaagagcgtttttgataaccgaataggcaagtccggcagaaatatcagaaacctctgcgccttccttctgggcctgctttaccttggagttcataaataccgtacatcttgtgccgagatctataggatgttgtgcaaaaagggctgcttttgcgaagtcctgcacactgtagttcagagattttgcaaaggtttcaataaaggaaccgcacccggaagagcaggcttcattaagctgcacactgtctacagtctgatttttgatcttgatgcacttcatatcctgtccgccgatatcaaggatgcagtctacctcagggtcaaaaaaggcggcggcataataatgggaaactgtttccacttctccctcgtcaaggagaagggctgctttgatcagagcttctccgtatcctgtggaacaggcataggcaatatgggcatcctctggcagctgtgaataaatttcctgaatagaacggatggcagtattcagagggcttccgttattgctgctgtaaaaagaataaagaaggctgccgtcttcgcctacaagagcggtttttgtggtggtgcttccggcgtcaatgccaagataacagtttccgctgtaagtggaaagatcaccggtggttacccggtaagagctctggcgttctgtaaattcctgataatcctcttctgaagaaaaaagaggctccatgcgctctacttcaaaatcaagcttaatggaatggcggagacggtcttttaagtctgtgagagaaactgccacttccttctttgcattgagagcagagccgatggctgcaaaaagatgagaattttccggcacaatggtgtgttcctcatccagcttcagagtacggataaaggcagctttcagctctgataaaaagtgcagcggacctcccagaaaagccacatgacctctgatgggcttgccgcaggcaagaccggaaatagtctggttgacaactgcctgaaaaatagaggcagaaagatcttccttggtggcgccctcattgatcagaggctgaatatctgtttttgcaaaaacaccgcagcgggctgcaatgggatagagagccttataattttttgcatactcattcagaccaggggcgtctgtctgaagcagagatgccatctgatcgataaaagagcctgtaccgccggcacagattccattcatacgctgttcgatatttccgccttcaaaataaatgatcttggcatcctcaccgccaagctcaatggcaacatctgtctgtggagccattgtctgcagggaggaggaaacagcgattacttcctggacaaacgggatctccagatgattggcaagagtcagacctccggaaccggtgatcaccggatgaagggtacactcgccaagcttatcatatgccttctggagaagatcggccagagtttcctgaatgtttgcaaaatgtctctgataatcggcaaacaacagggtttgattttcatcaagaatcgcaatttttacggtggtagatccgatatcaattcctaatgtatatgtattcataaaatgtgagtcagcctcctcgtgtcgtatctgttgtagatctgtcaaatattctttcttattataagtaaacgataagataaagattccgtaacattatacgacaaagtttttaaaatgacaatgtataactttcacaatttgtaagggtaaacaggcgcgggattctgaaaaatagataaaaataatctgattttaatatgtgaaaatatatcggtcgtttatagggcgcgatctatcacagtacaaacagcaggatttcctccggctgtgtactttactttttatgcaatacaagttatactgaaaaacagtaaaaatattaccgcagaaagaggaagcagaaatatggcagaatataagttgctgaaaacagaggggcgtgcaaaaagagcagagtttcatacggtccacggtaccatacagacccctgtatttatgaatgtaggaaccatcggcgccattaaaggcgcggtgtccaccatggatcttcatgagattggaactcaggtagagctttccaatacctatcatcttcatgtgcgccctggtgataaagtggtaaaacagcttggcgggcttcacaagtttatggtatgggacaaaccgatcctgacagattccggtggtttccaggtgttttcccttgccaagctccgcaagatcaaggaggagggcgttcatttccagtcccatattgacggacataaaatctttatgggtccggaggaaagtatgcagatccagtccaatcttgcatccaccattgccatggcctttgacgaatgtccaagcagtgttgcagacagagattatgtgcagaaatccgtagagaggactacccgctggcttgccagatgcaaaacagaaatggcaaggctgaacagtctgccggataccatcaataagaatcagcttctttttggcatcaatcagggcgccatttatgaagatatccgtattgagcatgcaaaagaaattgcaaaaatggatctggacggttatgcagtaggcggacttgcagtaggagaaactcatgaagaaatgtatcggatcctggatgcagtggttccgtatctgcctcagaacaaacctacctatcttatgggggtgggaacacctgccaatatcattgaaggcgtagacagaggcgtggatttctttgactgcgtatatccaagccgaaacggacgtcatggccatgtgtataccaatcatggaaaaatgaacatgttcaatgcaaaatatgaactggatacaagaccgatagaagaaggctgtcagtgtccggcctgccgtcattacagcagagcctatatccgtcatcttctgaaagcaaaggagatgctgggaatgcgcctctgcgttctccataatctgtatttttataatcacatgatggaggagatcagagaagctcttgatgaaggcagatttgcagaatataagaaaatgcgactggaaggcttcctcagaggagaataaaaactgtataaataaaatacagaaatagaaaaaaagcaacaaaaacacttgaagaaattcttatttttgtgtatgatgtgttataatgcttccggacagggaagcaggtaagacagtcaggaaacaggaggaaacaaaatggaagcaagcggagctgcaagtatgggcatgatgatcatttggatggtaatcatctttggaattatgtatttcctgatgatccgccctcagaaaaaagagcagaaaagacttcaggctatgctgaacagtatggaagtaggcgacagcgttgtaacaacaagcggtttctacggtgttgttattgacatgacagaagaagacgttattgtagagtttggaaacaacaaaaactgccgtattcctatgagaaaacaggcaattgcagaagtagagaaagctgagcaggcaactgcataacgaaaaaataggcaccgggtgaccggtgcttatttttttaactgaaaaattgctgatacatatatgtgagtatttggtgttatcttcgtcataaagaattttaatttagtcttttctttaaaaatgaccaaattgaattgaaaatgataaaaagatatgttagtctatatgtgaactggtgaattttacaggaggacattgtgagaacttttaattataaattacattataaagatttacttcaacctgacatcgtaagagtgatttccaggatccacgaatataaaggagagcaaactttatttattgaggcaaaagcagatactctggcccaattgatggatcttgcaaaaattcaaagtacagaagcttcaaataaaattgagggcatttatacctctgacgaacgtctgaaaaagattgttcaggataaaacaagaccaaaaacaagaaatgaaaaggagattgcaggatacagggatgttcttgcaaccatacacgaaaaccatgattatattccgttgaagccgtcaattattttacagctgcatagagatttgtgcaaattctcaggtaatccaggtggcgtatttaaaaatgtggataatatcatagaggaagaagataaagacgggaataaaagagtgcgttttcagcctgttccggcatgggaaacaccagaagatattgaagcaatctgcaaggcgtatgatgaaatttgcagagatgaagagtatgatagtttgcttgttatccctatgtttattttagattttttatgtatacatccttttggagatggaaatggaagaatgagcagactgctgacattacttcttttataccgatccggttatattgttggaaaatatatcagcatagaaaaaatgattgaacagtcaaaagaaagctactatgaagcactggcacaaagttcagaaaactggcacgaggaagaaaatgattatattccgtttgtcagatatatgctgggagttataatcgctgcttatcgggagttttcttcccgggtgcagattctgacaatcgatagattctccaagccagaacgtattcgtgagattttgaaaaatcatcttgggaaaataacaaaagcagaattgatgaacaagtgtccggatatcagtcagacaacggtacagaggactttaaatgaattgctaaaaaaaggagaggtcttaaaaataggcggtggtcgctatacggcttatacctggaatagggaggacgaataaatgataacaggtgaattaaaaaacagaattgacagtctttgggagattttttggacaggtgggttgacaaatccactggatgtaattgagcaaatgacatatctcatgtttattcgggatttggatgatacagataatatccgtgcaaaagaagccgctatgttagggcttccctataaaagtactttttcgggagaaatccagataggagagcgtattgttgatggaaatcaattaaaatggagtgtgtttcatgattttcctgcaggaaaaatgtatgcaaacgttcaggaactggtatttccatttataaaagaactgcatggtgataaaaacagcgcttatgcaaaatatatgggagacgctatttttaaagttccaacgcctcttatgctggataaggtcgtgactgcaatggacgaaatttatgagcaaatgtcaagactgaaagaagcggatacacgtggagacgtatatgagtatttgctatccaagctagctacagcaggggtgaatgggcaatttcggacaccgaggcatattattcgaatgattgtcgatatgatggaaccgcggcctgatgatatgatctgtgatccggcatgcgggacttccggtttccttgtggctgcaagtgaatatttaaaggaaaaccgtaaggaagaggttctttttaatcggaaaaataaggaacattatatgaatcatatgttttatggattcgatatggacagaaccatgcttcgtattggagcaatgaacatgatgacccatggagtagagaatccttttatcgagtatagagacagtctttctgatcagaatcaggataaagaaaaatatagtctgattttggcaaatccgccgtttaaaggatcactggattatgatattgtatcagcagatctgttgaaagtatgcaaaactaaaaagacagaattgctgtttttggcactgtttttaagaatgctgaaagtgggaggacggtgtgcctgtattgttccagacggtgttttgttcggctcttctactgcccataaggcaatccgaaaggaattgattgagaataatcgtttagaggcagtgatttccatgccttccggggtatttaaaccatatgcaggagtttcaacagcagtccttgtatttacaaaaacaggacatggtggaacagataacgtctggttttatgatatgaaagcagatgggttcagtttggatgataagagaaatgaaatatctgaaaatgatattcaggatattatccaaagattccataatctggatgaagaaaaggaacgtgagcgcacagagcagagcttttttgtacccaaggatgaaattgtagaaaatggttatgatttatcaattaataaatataaaaaaatagagtacattcctgtggaatatccgccaacagaagagattctggcagatatacgcaagctggaggcggaaattgcagcggaaatggacgaattggagaaactgttgaaagagtaaattcggattgaccgagctctttagagcgagggatgcttcttgcacgtagggcaagaagatgggaaatccgatagaaaagatttgagggaatgaagatgaaagccaaaataggtgatttgacaaaaataaggacaggtaagcttgatgcaaatgcgtcctcggaagatggtcagtatccttttttcacatgttcaaaagagccattaaaaatatcatcatattcttatgattgtgagtgtgtacttgtagctggtaatggtgatttaaatgtaaagtattataacggaaagtttgatgcttatcagagaacatatattattgaggataatgatagtggtaagttatttatgccatatctgtattacttcatggaaggatacatggaagagctaagaaaacaggctataggtggagtgattaaatatattaagctagaaaatcttacagatgctttaattaagttgccatctattgatgaacaaaaggcaatcgtaaatgttttggaaaaggttaagaatgttttgactactcatgacaaagaaatttgtaaactagacgaacttatgagagcccgatttgtcgagatgtttggtgatccaacagcaaatgagaagtgttggaataaggtacctctttccacttgtgtagagagcatagataacggcaagagctttgtatgtgattctggagcaaggcaaggaacctctccagcggtactgaaattaagtgcggctacatatggtgattatcgtcctgaagaaaataaggcaattcttgacgaaaaacaatttgttgaggaggctgctgtgcattcaggagatttgttgttcacaaggaaaaacacaccagaattagttggtatgtgtgcatatgtttataaaactccagctggattaatgatgcctgatttgatttttcggctgaatacgaccgaaagatgtaataagatatttctttggaaactaattaatcacgatttatttagaggttgtatacaggcaattgctactggttcggcaaagtcaatgtccaatatctcaaaggaacgattgctcaagattaaagtgattttaccgccaaatgaattgcaggaacaattcgccgccttcgtcactcaaacagacaaattaaaggttaccatacagaagtctctggatgagacacaagtattgtttgatagtttgatacaaaaatattttggataaggctaagttctatgaagattgataaaaataaaccattaccagaacatactaaacttgattatgatgaatgttgtgcattacttgttttgaaagagttatttcctgatagatatagcatattagaaatatcagataaacctgatttgcaaggagtaaatgttggagtggaagtaacaattgcagatgacaagaaccatcaagaatcattaaagaattgggtgaaagcttaccactgtaatgatgaaaaaaagcggaaacgttacattgaacgtatgaaacaattaggagttgaatatacagggggaattcagtcttggcctgggcgtgtgccatcgcttaagcatgttaaggaaagcgtaaatacaaagataggaaagttgaaatccagaaattatgaagagtttccaagctatgagctttttatattcacagatacttggatgcatgaaaatatattggaagagatggaaaagtttttggcagacagtaatgtgtttaaagcttttaacagggtatatgtatttgaacaggaatctaatttgcatatatttgaagaaaataattatcaaagagtggtaattgatataacagagcaatctgaacggaatataagagctagaaggatggttgaacaagctgaagatcaagaataagaaatagaaatattctaaacatgtatttggaagttgatgttaagcaatggtagaggagttccgttggaagtgagttaaaagaataataagaacggggtgattttcatgaccaacttggatttccttaagaaagaaccacaatttggttctttcgcagatgtggccatttcggctgagaaaatattacatattgatatggaagacaacgtgatcaattgccaccgggtcatggagttcgccatcaaatggatgtattccgtagatggctcgcgtgtcatgccgtatcaggatacgctggtcagcttgatgagtacagaagagttccgggacattgtagatccggatctttggagaagacaggattttatccgcaaggtgggaaacaatgtggctcataatggcaagaagattaccctgaatcaaacaaaatcatgtctggaaaagctgtatatctttctggattttgtggcgcattgttatgccaaagattatacggaaggagagcttcatgtagagcagaaaaaactgttttggaagaagtactaccaatttcggaaattaatctgaaagttcttattgcagaaaatcagtcattgaaagagcaactgactgcaagacgtgaagagcagcaatagacgtatgtaccgaaaccgcttgatctgtctgagtataagaccagaaagatttacatagataccatgttgatggatgccggatggacagaagggaaaaactggaacaatgaagtggagctcctgggaatgccaaataaatcagaggtgggatatgcagattatgtgctttatgatgatgctcatagaccacttgccttaattgctgcaacagttttgggtattggcaaaatttaaatatccaacccatcagattaatttttgcacaaaagacgcgctgaaatgtctggaatacagaggggttgaggaggttttgtaatggtaaattcaggaagagagtccgcaaaagataatgatctgttctttacatgcagtttgattgactatattgcaagaaaaacaaaaaatacaagagctgaggtagtaaacgcattaggagaaaagtatttgacaaaaatttacgatttagcagacatttatcatagtgataatatagatcgtgttagtgatgattttatcagagacgccaaaatcagcacaggcgattttgacaatgttgcatcctgtaaatatgccattccatctcattgggatattggaaaagtatataaaagactgataaaatctgtggcagaatacgaaaagatagatgttattgatgccctgctaaaagtctataactcatttatcagcagtaaaattgatgattataacagtagtatgtactatgaaaatccatcgtatttgttggaatgttatttggagaacaaagctatataaaaattttgggggcaggatgttggtatgattaggagaaagtatcaacatggaagaaaaaattgtacaaattattaataaaatggcagattatttgaatgtttcacagatgaaaaagctgcaggaagttttgctgcaaacattttcggaaaataatatatcaaaagaagaaacttcaaatgacgagtatctgcagttgtttttagatgcaaaaaagattgaagggtgttcggcgcgaaccatagagtattatagctccacggtagagcgaatgcttcaaaatataaaacagcctatacgaaagatttctacagaagaaatcaggaaataccttgttgattatcagaaaattaataattgcagtaaggttacagtagataatatccgacgaaatatttccagttttttctcctggttggaggaagaagattatattttgaaaagccccatgaggcgcattcataaaataaaaaccatgcagccagtaaaagaaataatttcagatgaagcaatagaattactcagggacaattgtaaatgcaccagagatcttgctatgattgatttgctgtattctacaggaatacgagtgggggatgctgatggtaaaataagtctaaatcaacagaaacccagtaaacatgcggggttgaggcgatttggtcctgaaaaattcttgcaacgaaacaacgaatttatgaaggaaaggccgatcttttataaaaaaccaattaaaacagagaaagatttcagtacatggctgagatgtttttactataccacgaaagcggtgataactgaatatatttatttttaggactgaattagctcgcacggacattagttccggctgtctggttcagtcctcttttttatttgagatcaaagaaaggtgataaagaatatggcaaagattatatccgtagtcaaccagaaaggcggaactggaaaatccgcatgtgcggcaaatcttggtgtagggttggctcttatgaataagaaggtgttagttgtggatgctgatcctcagtcagatgtgtctgcgggatttggattccgtgactgcgataatagtaatgaaacattaacaacgctgatggaaatggtgttgagtgatgaagatattccggaagactgctttatccagcatacggaggaaggtattgatattatctgttccaatattggattggcaggaaccgaggttcagcttgtaaatgcgatgagccgtgaatttgttctgaaacaaatattaaacagggtaaaagaccggtacgatacaattttgatagattgtatgccatctttgggtatgatcaccatcaatgccctggcagcatcggatgaagtattgattccggtagaagcatcttatcttccaatcaaaggactgcagcagctcttgaagacaatcggtaaagtaagaagacagattaacccgaaactgcagattgccggtatccttttcagtatggtggatgcccatacaaatgatgcaagaaacaatatggagttgcttcataatgcctatggaaatcagattcatgtgtttgacaattatattccattttctgtcaggatgaaagaagcggttagagaagggcagagtatttttaagtacgaaccaaaaggtaaagttgcgaaagcttatatgagttttacggaggaggtccttgaacatggcaggtaaaaagaagccaacgccaatcccattacagtcattagatgccctgttcggaacaacaagtgaggtacaggcaggcatccaacagattgctctggataatctgcatcctttctcaaatcatccgtttaaggttctggatgatgacaaaatggctgagttgtctgagagtgtaaggacgcatggagttttggtgcctggtattgtaagagtaaaggataccggcggttatgaaattatagcggggcaccgccgcaagagggcgtgtgagattgcaggcttgaaaactatgccagttattattaaggacctgacagatgatgaatcgacggtgattatggttgactcaaacattcagcgtgaagaactgttgatcagtgaaaaggcatttgcctataagatgaaatatgatgcattgaaacgtcagggcaaacgaagtgatttaacttcttgccaagttggcaagaagttggcggcagagaaagtcagtcagaatactggagatagtaccagacagattttgagatatatccatctgacagaattgattccggaaatgttatgtctggcggataacaaaaagattcctttcaatactgcggtagaattatcttacttgaaactggaagaacagaaactattactccaatatatgggtaaccatgaaatggttccgtccatgaagcaggcgcaggaaatgaagaagtgttctaaggaacatatactgacatatccggaaattgatagtatctgttgccagagtaaaacagaaaaattacaggtgaagctgccggaaaagaaactccggatgtttttcccggagagttattccaaagagcagatagaagatgtgatttttaaattgttaaaggaatgggcagataataaggagcgtgttcataatgacaatcgtggatgtgattaagaaggcattgttaccactggcagctatggcattctggctctggatggtaaaaacgattatgggagtaagcgggaatacagatttatttatgttcctgttcgttgccgggcttccatttggaatacataaaatgtgcttcattttaatccccaaaggatatgatgttgggggtaccattggaatgatcgcattgagtgttattgtgggtggtttattgggaagccttatgattccatattatgttgtgagagcattctatgtgaccatccggtatatagtaaaaagataatgaatagtagatttgaggcaggcttgcgaaaaaccaaattcgtaagcctgcctttttttgtgcgataaagctggaaagcacaaagccaaacttgtttggatttgtatttgacagctaacggtcattgagcagcaaagctgcgaaatgtgcaataaagcaggcaattcaggggcaatccccttttgcataaagaataagacggaggagaacgaacatgagagagcgaatcaaaaacaaacagattagcaaagaaatcagagggcagcttccggttattacaccggctatgttccgggaaaggggctgttcctattgcccttattatgcaggaagttatgaaaaatttccaaggtgtatgatggcagattgtgcctgggatgatgaagaagaacatttccatccggctcttcgccagatgcttccggaatttaaaaggaagatggaaaaagcagaagagaaatatctggaactgaaaactgattatgaactgcttatgagcatgtttgcggctgaaatggaacaggaggaactggaaaaagatgaatgttacgactgttgttatgccaagtgtggtccatgtatcgggctgtgctataaaacactgaaaggataggaggatgtgaggtaatgaatacagcaattatttccggaagactggttcgtgatccgggctataacgagacacagaatgaaaaaggtcttcataagatcgccaagtttgtactggcagtcagaagaaattactcagatgatgtcagttttattccagtgaaagcctttgcaaaaaaagcagagtttgtccgtgattacctggtgcaggggacaaaggtgatggtggagggagaaatcgtaaccggtagttacgataataaggagactggcaaaaaggtatatacgacagagctttttgcggaccgtatcgagtttgccggtgcaaaagtgcaggagaaaatgccggagccgatggaaggggatggttttctgaacatcccggaatctatggaagaagaaatgccgtttcgataggaggaaaagccaatggtaatgttaaataaagagtacatgatcaaccacatgagaaatgaaaatggttccatcaatatcaaaaatgtagtattggcggctgcctgtgaagcgaccgagctgttccagtgcctgattgtaatggacagcaactttacagattggagccgctttgttgaccgtctggagcagaacgtggaaaaacaggactatgaaaaagtccatgaactctgccagacaatgtatgccatgagacatctatcagaagaactggaagggttgtatctggtaagggatgatgcagagctttgttccttgtattatcagatttttgtgggaatgctggatttgactgttttctcaacagaggcaatggttgatctgaatggagggaagcatggtgagtaatcaggattatgtgccggtagaatgcctgctggtgccgaaggcactgtttaaggaagagagatattgctctttatccactacggcaaaggtattatacagcctcatgcttgaccggctgaaatatgcagcacagaacagatgggttgaccagaaagggaaactctatgtaatctatcccaaaagtgaaatgatcaaggatctgaatagtaccaaataccgggtagattacgctgtttcagaactggaaagtatgggaaacatggttcgggttgtaaaagacaatggcagaccgaaccgtttctatataaatgatatttcaaaatatgaggaggaaaacgcaatgatgacaattaaggatttgatggaaatggtaacaccggaggaggcagaggagattatggacaagatggtgacaactgccagggagattgttgatgatcttatgaaaaaaggctacattgagattatcaaggaaggctgtccggagggagggcatctggaggacggtgtcccgccaactgatctgggagaggacgagtttaatccggaagatttaaatccgatggaattcagatgctactgcgatgaggacggtaacctggatgatgaggtaattgaagatgatgccagtgaatttggtatggacctggctttcggtgtgagtgaattgctggaaaatgatccggatagaattgaggctatccgccaatattttaaccatatctacaagatggaatccatgaagaaatttatggttgtcgtggagacaacggctgtgatctgcggcaattccccggaatggatcgaagatatgcacgcctgcaacaaaggtgccagacgtatctatttgaaagaactggtgagtgttttcaacatgtacctgaatatgttcaaaaacaaagaactggaataatgaggatgaaaaa
